(19) United States
(12) Patent Application Publication
(10) Pub. No.: US 2025/0084411 A1
(43) Pub. Date: Mar. 13, 2025

(54) Antisense Nucleic Acid

(71) Applicant: Sumitomo Pharma Co., Ltd., Osaka (JP)

(72) Inventors: Zhiqiu MAN, Osaka shi, Osaka (JP); Shigehiro ASANO, Osaka-shi, Osaka (JP); Kyosuke HINO, Osaka-shi, Osaka (JP)

(73) Assignee: SUMITOMO PHARMA CO., LTD., Osaka (JP)

(21) Appl. No.: 18/564,976

(22) PCT Filed: May 27, 2022
(86) PCT No.: PCT/JP2022/021818

§ 371 Date: Nov. 28, 2023

(30) Foreign Application Priority Data
May 28, 2021 (JP) 2021-090359

(51) Int. Cl. C12N 15/113

(52) U.S. Cl. CPC C12N 15/113; C12N 2310/11; C12N 2310/315; C12N 2320/33

(57) ABSTRACT

The present disclosure relates to an oligonucleotide that expresses functional human WRN protein against skip mutation in the 26th or 28th exon of human WRN gene, or a pharmaceutically acceptable salt thereof, and use thereof.

### TECHNICAL FIELD

[0001] The present invention relates to an antisense oligonucleotide (antisense nucleic acid) that enables skipping of the 27th exon of a WRN gene, which is the causal gene for Werner syndrome, and a pharmaceutical composition containing the oligonucleotide.

### BACKGROUND ART

[0002] Werner syndrome is a rare disease that causes premature ageing, and is known to present in the juvenile stage with common features found in elderly such as generation of white hair, hair loss, diabetes mellitus, heart disease, cancers, skin retraction, scleroderma-like skin changes, juvenile cataract, progeria, and hypogonadism. More specifically, geriatric symptoms including skin atrophy and sclerosis, hair change such as white hair and baldness, and cataracts begin to appear in the twenties and thirties. In addition, diabetes mellitus, arteriosclerosis, malignant tumors, and others are likely to occur in combination, and most of the patients die in their fifties. In many cases, exacerbation of the refractory skin ulcer that usually develops on the elbows, knees, heels, and the like, leads to amputation of the extremities, with a consequent deterioration in quality of life (NPL 1).

[0003] Werner syndrome is an autosomal recessive rare disease for which the WRN gene, located on the short arm of chromosome 8 (8p12) and encoding the RecQ DNA/RNA helicase (WRN helicase), has been identified as the causative gene (NPL 2, NPL 3).

[0004] The WRN protein consists of 1432 amino acids, and has ATP-dependent DNA/RNA helicase activity and 3′->5′ exonuclease activity. The WRN protein has various physiological functions including DNA replication, base excision repair, DNA double-strand break repair, transcription, and telomere maintenance, and serves for gene repair and maintenance of the stability of chromosomes. Therefore, significant genomic destabilization is found in Werner syndrome. Fibroblasts derived from a Werner syndrome patient have a shorter replicative lifespan and exhibit significantly lower growth rates than normal cells derived from a healthy individual (NPL 4). The reduced proliferative potential of fibroblasts is inferred to be a cause for delayed of wound healing of skin ulcers in Werner syndrome (NPL 5).

[0005] A nuclear localization signal (NLS) is located near the C terminus of the WRN protein and is involved in normal physiological functions by inducing nuclear localization (FIG. 1). However, when an incomplete WRN protein with a deletion of the nuclear localization signal is generated due to the occurrence of a premature stop codon (termination codon) as a result of a mutation such as splicing, nonsense, and frameshift mutations, the WRN helicase, which is supposed to function in the nuclei, is prevented from being localized in the nuclei, and is thus unable to perform its functions, resulting in the onset of Werner syndrome (FIG. 1 and FIG. 2) (NPL 3).

[0006] In approximately 7/10 of Japanese patients with Werner syndrome, the reading frame is shifted (out-of-frame) by the skipping mutation c.3139-1G>C in the 26th exon of the human WRN gene, resulting in the occurrence of a stop codon (termination codon) in the 27th exon (hereinafter, occasionally referred to as “exon 27”). Therefore, a WRN protein with deletion of the nuclear localization signal, which is otherwise present at the C-terminal part corresponding to the downstream of the 27th exon of the human WRN gene, is generated, leading to the loss of the original functions (FIG. 2) (NPL 3).

### CITATION LIST

### Patent Literature

[0007] PTL 1: WO 2011/052436
[0008] PTL 2: WO 2014/046212
[0009] PTL 3: WO 2015/125783
[0010] PTL 4: WO 1991/009033
[0011] PTL 5: WO 2009/064471

### Non Patent Literature

[0012] NPL 1: Geriatr Gerontol Int (2013) 13:475-481
[0013] NPL 2: Nature (1992) 355:735-738
[0014] NPL 3: Am. J. Hum. Genet. (1997) 60:330-341
[0015] NPL 4: Human Genetics (1981) 58:310-316
[0016] NPL 5: Rinsho derma (2000) 40:1512-1513
[0017] NPL 6: Annu. Rev. Pharmacol. Toxicol. (2010) 50:259-293
[0018] NPL 7: J. Med. Chem. (2016) 59:9645-9667
[0019] NPL 8: J. Am. Chem. Soc (2016) 138:15663-15672

### SUMMARY OF INVENTION

### Technical Problem

[0020] Although Werner syndrome is an orphan disease that threatens the lives and quality of life of patients, there is currently no effective treatment for Werner syndrome and the discovery of new therapeutic drugs is urgently needed.

[0021] In recent years, nucleic acid drugs have been used as new therapeutic agents. Nucleic acid drugs, each of which is composed of an oligonucleic acid, which is a nucleic acid or modified nucleic acid of ten to several tens of nucleotides linked together, are pharmaceuticals produced by chemical synthesis, some of which are known to act directly on messenger RNA involved in protein translation or noncoding RNA or the like, and some of which are known to act on target protein like antibody drugs. Splicing-switching antisense oligonucleotides, one of the nucleic acid drugs, can inhibit the binding of a splicing factor to an mRNA precursor (hereinafter, occasionally referred to as “pre-mRNA”) to switch splicing of a nearby exon (splice-out), thereby normalizing the reading frame of frameshifted abnormal RNA. Accordingly, one exon of a gene is spliced out to allow expression of the corresponding protein retaining the N-terminal and C-terminal parts that are important for functional expression to be expressed. Thus, skipping a targeted exon with a splice-switching antisense oligonucleotide allows a functional protein to be re-expressed that has been translated to the C-terminus, thereby potentially ameliorating the pathological condition of a disease. This is called exon-skipping therapy, and the proteins expressed by the treatment are shorter than normal, but can still restore the functions that were defective due to a mutation (NPL 6).

[0022] As described above, the skipping mutation c.3139-1G>C in the 26th exon of the human WRN gene has been reported as the most common mutation in Werner syndrome. The skipping mutation c.3139-1G>C causes the appearance of a termination codon within the 27th exon, and a WRN protein with a deletion of an amino acid sequence corresponding to the downstream of the termination codon and containing a nuclear localization signal present in the C-terminal part, is generated, resulting in the loss of the original physiological functions. To improve such condition, the present inventors focused on splicing-switching antisense oligonucleotides, and investigated to discover an antisense oligonucleotide that induces skipping of exon 27 of a human WRN gene.

[0023] The present invention was made in view of such circumstances, and an object of the technical problem to be solved by the present invention is to provide an oligonucleotide enabling skipping of the 27th exon of the human WRN gene, and an composition containing the oligonucleotide and enabling skipping of the 27th exon of a human WRN gene with high efficiency.

### Solution to Problem

[0024] The present inventors have found that by targeting a sequence consisting of nucleotides of exon 27 and those around it in an mRNA precursor for the human WRN gene with an antisense oligonucleotide, skipping of exon 27 can be induced with high efficiency. On the basis of this finding, the present invention was completed. More particularly, the present invention is as follows.

[0025] [1] An oligonucleotide according to the present invention is an oligonucleotide that expresses a functional human WRN protein against a skipping mutation in the 26th or 28th exon of the human WRN gene, or a pharmaceutically acceptable salt thereof, wherein
[0026] one nucleotide is bound to another via a phosphate group and/or modified phosphate group in the oligonucleotide,
[0027] the oligonucleotide contains a modified nucleic acid having at least one modified sugar,
[0028] the oligonucleotide is 10 to 30 mer in nucleotide length, and
[0029] the nucleotide sequence of the oligonucleotide is:
[0030] a nucleotide sequence having a sequence identity of 90% or more and 100% or less with a nucleotide sequence complementary to at least one target region having the same nucleotide length as the oligonucleotide in a nucleotide sequence set forth in SEQ ID NO: 1, SEQ ID NO: 2, SEQ ID NO: 3, SEQ ID NO: 4, SEQ ID NO: 5, or SEQ ID NO: 6;
[0031] a nucleotide sequence complementary to a nucleotide sequence formed by deleting, substituting, inserting, or adding one or several nucleotides in the target region; or
[0032] a nucleotide sequence hybridizable with an oligonucleotide having the target region under stringent conditions.

[0033] An oligonucleotide having the configuration or a pharmaceutically acceptable salt thereof which enables skipping of the 27th exon of the human WRN gene.

[0034] [2] It is preferable that the nucleotide sequence of the oligonucleotide be a nucleotide sequence having a sequence identity of 95% or more and 100% or less with a nucleotide sequence complementary to at least one target region having the same nucleotide length as the oligonucleotide in a nucleotide sequence set forth in SEQ ID NO: 1, SEQ ID NO: 2, SEQ ID NO: 3, SEQ ID NO: 4, SEQ ID NO: 5, or SEQ ID NO: 6.

[0035] [3] It is preferable that the nucleotide sequence of the oligonucleotide be a nucleotide sequence complementary to at least one target region having the same nucleotide length as the oligonucleotide in a nucleotide sequence set forth in SEQ ID NO: 1, SEQ ID NO: 2, SEQ ID NO: 3, SEQ ID NO: 4, SEQ ID NO: 5, or SEQ ID NO: 6.

[0036] [4] It is preferable that the oligonucleotide be 15 to 25 mer in nucleotide length.

[0037] [5] It is preferable that a sugar constituting the oligonucleotide be D-ribofuranose, and modification of a sugar be sugar modification on a hydroxy group at position 2′ of D-ribofuranose.

[0038] [6] It is preferable that modification of a sugar constituting the oligonucleotide be made to form a group represented by the following formula (A1):

[chemical structure]

wherein Bx is a nucleobase, being independently in each occurrence a group formed from adenine, guanine, cytosine, 5-methylcytosine, thymine, or uracil; X is a phosphate bond, being independently in each occurrence a phosphodiester bond, a phosphorothioate bond, a phosphorodithioate bond, a phosphoamidate bond, a boranophosphate bond, or an alkylphosphonate bond; Y is independently in each occurrence a hydrogen atom, a hydroxy group, a fluorine atom, an optionally substituted alkoxy group having one to six carbon atoms, or an optionally substituted amino group; and Z is independently in each occurrence a hydrogen atom, or an alkyl group having one to five carbon atoms and optionally having a carbon-oxygen double bond or a cyclic structure, or a certain carbon atom in the alkyl group and Y are taken together to form a ring.

[0039] [7] It is preferable that modification of a sugar constituting the oligonucleotide be made to form a group represented by the following formula (A2) or formula (A3):

[chemical structure]

wherein Bx is a nucleobase, being independently in each occurrence a group formed from adenine, guanine, cytosine, 5-methylcytosine, thymine, or uracil; X is a phosphate bond, being independently in each occurrence a phosphodiester bond, a phosphorothioate bond, a phosphorodithioate bond, a phosphoamidate bond, a boranophosphate bond, or an alkylphosphonate bond; R⁴ is independently in each occurrence a hydrogen atom or an optionally substituted alkyl group having one to six carbon atoms; Y′ is an oxygen atom or an optionally substituted nitrogen atom; R⁵ and R⁶ are each independently in each occurrence a hydrogen atom or an optionally substituted alkyl group having one to six carbon atoms, or R⁵ and R⁶ are taken together to form a carbonyl group or a ring; and n is 0 or 1.

[0040] [8] It is preferable that modification of a sugar constituting the oligonucleotide be made to form a group represented by the formula (A2), and the R⁴ be independently in each occurrence a methyl group, a methoxyethyl group, or an N-methylpropanamide group.

[0041] [9] It is preferable that modification of a sugar constituting the oligonucleotide be made to form a group represented by the formula (A3), the Y′ be an oxygen atom, or a nitrogen atom optionally substituted with a hydrogen atom, a methyl group, a methoxyethyl group, or an N-methylpropanamide group, the R⁵ and R⁶ be each independently in each occurrence a hydrogen atom or an alkyl group having one or two carbon atoms, or the R⁵ and R⁶ be taken together to form a carbonyl group or a ring having three to six carbon atoms, and n be 0 or 1.

[0042] [10] It is preferable that at least one internucleotide bond in the oligonucleotide be a phosphorothioate bond.

[0043] [11] It is preferable that at least one internucleotide bond in the oligonucleotide be a phosphodiester bond.

[0044] [12] It is preferable that an internucleotide bond in the oligonucleotide be a phosphodiester bond or a phosphorothioate bond.

[0045] [13] It is preferable that the nucleotide sequence of the oligonucleotide be such that the oligonucleotide is composed of a morpholino nucleic acid represented by a formula (A4) below, and is a morpholino oligonucleic acid having a nucleotide sequence complementary to at least one target region having the same nucleotide length as the oligonucleotide in a nucleotide sequence set forth in SEQ ID NO: 1, SEQ ID NO: 2, SEQ ID NO: 3, SEQ ID NO: 4, SEQ ID NO: 5, or SEQ ID NO: 6:

[chemical structure]

wherein Bx is a nucleobase, being independently in each occurrence a group formed from adenine, guanine, cytosine, 5-methylcytosine, thymine, or uracil; and X′ is a phosphate bond, being independently in each occurrence a phosphorodiamidate bond, a phosphorodiamidothioate bond, or a phosphorodiamidodithioate bond.

[0046] [14] It is preferable that the nucleotide sequence of the oligonucleotide be: a nucleotide sequence having a sequence identity of 90% or more and 100% or less with a nucleotide sequence complementary to a target region composed of continuous 15 to 25 mer starting from a nucleotide at any of positions 1 to 40, 46, 51, 56, and 62 to 63 counted from a 5′ end in a nucleotide sequence set forth in SEQ ID NO: 1 or a target region composed of continuous 15 to 25 mer starting from a nucleotide at any of positions 108873, 108878 to 108917, 108923, 108928, 108933, and 108939 to 108940 counted from a 5′ end in a nucleotide sequence set forth in SEQ ID NO: 2;
[0047] a nucleotide sequence complementary to a nucleotide sequence formed by deleting, substituting, inserting, or adding one or several nucleotides in the target region; or
[0048] a nucleotide sequence hybridizable with an oligonucleotide having the target region under stringent conditions.

[0049] [15] It is preferable that the nucleotide sequence of the oligonucleotide be a nucleotide sequence having a sequence identity of 90% or more and 100% or less with a nucleotide sequence complementary to a target region composed of continuous 15 to 25 mer starting from a nucleotide at any of positions 1 to 32, 34 to 40, 46, 51, and 62 to 63 counted from a 5′ end in a nucleotide sequence set forth in SEQ ID NO: 1 or a target region composed of continuous 15 to 25 mer starting from a nucleotide at any of positions 108878 to 108909, 108911 to 108917, 108923, 108928, and 108939 to 108940 counted from 5′ end in a nucleotide sequence set forth in SEQ ID NO: 2.

[0050] [16] It is preferable that the nucleotide sequence of the oligonucleotide be a nucleotide sequence having a sequence identity of 90% or more and 100% or less with a nucleotide sequence complementary to a target region composed of continuous 15 to 25 mer starting from a nucleotide at any of positions 1, 3, 5 to 12, 14 to 19, 21, 25, 29, 30, 31, 34, 46, and 51 counted from a 5′ end in a nucleotide sequence set forth in SEQ ID NO: 1 or a target region composed of continuous 15 to 25 mer starting from a nucleotide at any of positions 108878, 108880, 108882 to 108889, 108891 to 108896, 108898, 108902, 108906 to 108908, 108911, 108923, and 108928 counted from a 5′ end in a nucleotide sequence set forth in SEQ ID NO: 2.

[0051] [17] It is preferable that the nucleotide sequence of the oligonucleotide be one nucleotide sequence selected from the group consisting of nucleotide sequences set forth in SEQ ID NOs: 9 to 14, 16 to 26, 28 to 39, 41 to 42, 44 to 50, 52, 55 to 56, 69, 73, 80 to 105, 107 to 108, 110, 112, 114, 116, 118 to 131, 133, and 135.

[0052] [18] It is preferable that the oligonucleotide be one oligonucleotide selected from the group consisting of 6-20-A, 8-20-A, 8-20-B, 8-20-C, 9-20-A, 10-20-A, 12-20-A, 14-20-A, 16-20-A, 17-20-A, 18-20-A, 19-20-A, 15-25-A, 10-17-A, 10-20-B, 12-20-B, 14-20-B, 15-20-B, 16-20-B, 19-20-B, 31-20-B, 34-20-B, 6-20-B, 7-20-B, 8-20-D, and 9-20-B as sequence names shown in Table 2-1 to Table 2-7.

[0053] [19] It is preferable that the oligonucleotide be a single-stranded antisense oligonucleotide.

[0054] [20] A double-stranded antisense oligonucleotide according to the present invention is a double-stranded antisense oligonucleotide containing the oligonucleotide according to [19] and a second-strand oligonucleotide hybridizing with the single-stranded antisense oligonucleotide, or a pharmaceutically acceptable salt thereof, wherein
[0055] the nucleotide sequence of the second-strand oligonucleotide is a nucleotide sequence having a sequence identity of 90% or more and 100% or less with a nucleotide sequence complementary to the nucleotide sequence of the single-stranded antisense oligonucleotide.

[0056] [21] An oligonucleotide complex according to the present invention is an oligonucleotide complex or a pharmaceutically acceptable salt thereof, the oligonucleotide complex containing:
[0057] the oligonucleotide or a pharmaceutically acceptable salt thereof according to any one of [1] to [19], or the double-stranded antisense oligonucleotide or a pharmaceutically acceptable salt thereof according to [20]; and
[0058] an additive substance bound to the oligonucleotide or the second-strand oligonucleotide directly or via a linker bond, wherein
[0059] the additive substance is selected from the group consisting of polyethylene glycol, a peptide, an alkyl chain, a ligand compound, an antibody, a protein, and a sugar chain, and
[0060] the linker bond is independently in each occurrence a phosphodiester bond, a phosphorothioate bond, a phosphorodithioate bond, a phosphoamidate bond, a boranophosphate bond, an alkylphosphonate bond, a phosphorodiamidate bond, a phosphorodiamidothioate bond, or a phosphorodiamidodithioate bond.

[0061] [22] A pharmaceutical product according to the present invention is a pharmaceutical product containing the oligonucleotide or a pharmaceutically acceptable salt thereof according to any one of [1] to [19], the double-stranded antisense oligonucleotide or a pharmaceutically acceptable salt thereof according to [20], or the oligonucleotide complex or a pharmaceutically acceptable salt thereof according to [21] as an active ingredient.

[0062] [23] A skipping agent for the 27th exon of a human WRN gene according to the present invention is a skipping agent for the 27th exon of a human WRN gene, the skipping agent containing the oligonucleotide or a pharmaceutically acceptable salt thereof according to any one of [1] to [19], the double-stranded antisense oligonucleotide or a pharmaceutically acceptable salt thereof according to [20], or the oligonucleotide complex or a pharmaceutically acceptable salt thereof according to [21] as an active ingredient.

[0063] [24] A functional WRN recovery agent according to the present invention is a functional WRN recovery agent that possesses a nuclear localization signal by virtue of skipping of the 27th exon of a human WRN gene, the functional WRN recovery agent containing the oligonucleotide or a pharmaceutically acceptable salt thereof according to any one of [1] to [19], the double-stranded antisense oligonucleotide or a pharmaceutically acceptable salt thereof according to [20], or the oligonucleotide complex or a pharmaceutically acceptable salt thereof according to [21] as an active ingredient.

[0064] [25] A therapeutic agent for Werner syndrome according to the present invention is a therapeutic agent for Werner syndrome, the therapeutic agent containing the oligonucleotide or a pharmaceutically acceptable salt thereof according to any one of [1] to [19], the double-stranded antisense oligonucleotide or a pharmaceutically acceptable salt thereof according to [20], or the oligonucleotide complex or a pharmaceutically acceptable salt thereof according to [21] as an active ingredient.

[0065] [26] A prophylactic agent for Werner syndrome according to the present invention is a prophylactic agent for Werner syndrome, the prophylactic agent containing the oligonucleotide or a pharmaceutically acceptable salt thereof according to any one of [1] to [19], the double-stranded antisense oligonucleotide or a pharmaceutically acceptable salt thereof according to [20], or the oligonucleotide complex or a pharmaceutically acceptable salt thereof according [21] to as an active ingredient.

[0066] [27] A method for treating or preventing Werner syndrome according to the present invention is a method for treating or preventing Werner syndrome, the method including administering the oligonucleotide or a pharmaceutically acceptable salt thereof according to any one of [1] to [19], the double-stranded antisense oligonucleotide or a pharmaceutically acceptable salt thereof according to [20], or the oligonucleotide complex or a pharmaceutically acceptable salt thereof according to [21] to an individual.

[0067] [28] The present invention provides the oligonucleotide or a pharmaceutically acceptable salt thereof according to any one of [1] to [19], the double-stranded antisense oligonucleotide or a pharmaceutically acceptable salt thereof according to [20], or the oligonucleotide complex or a pharmaceutically acceptable salt thereof according to [21] for use in treating or preventing Werner syndrome.

[0068] [29] The present invention provides the oligonucleotide or a pharmaceutically acceptable salt thereof according to any one of [1] to [19], the double-stranded antisense oligonucleotide or a pharmaceutically acceptable salt thereof according to [20], or the oligonucleotide complex or a pharmaceutically acceptable salt thereof according to [21] for use in producing a therapeutic agent or prophylactic agent for Werner syndrome.

### Advantageous Effects of Invention

[0069] The present invention can provide an oligonucleotide that enables skipping of the 27th exon of a human WRN gene, and an agent that contains the oligonucleotide and allows the 27th exon of a human WRN gene to be skipped with high efficiency.

### BRIEF DESCRIPTION OF DRAWINGS

[0070] FIG. 1 is a schematic diagram illustrating the structure of a human WRN gene product.

[0071] FIG. 2 is a schematic diagram for describing the onset mechanism of Werner syndrome involving the skipping mutation c.3139-1G>C in the 26th exon.

[0072] FIG. 3 is a schematic diagram for describing the mechanism of skipping of exon 27 with a single-stranded antisense oligonucleotide according to the present embodiment.

[0073] FIG. 4 is a schematic diagram illustrating the relative position of an antisense oligonucleotide in exon 27 designed to induce skipping of WRN exon 27 to exon 27.

[0074] FIG. 5 is a photograph of electrophoresis showing skipping efficiency for exon 27 of a WRN gene in HEK293T.

[0075] FIG. 6 is a photograph of electrophoresis showing skipping activity for exon 27 of a WRN gene in Werner syndrome patient fibroblasts possessing the skipping mutation c.3139-1G>C in the 26th exon.

[0076] FIG. 7 is images of fluorescence microscopy showing skipping activity for exon 27 of a WRN gene in Werner syndrome patient fibroblasts possessing the skipping mutation c.3139-1G>C in the 26th exon.

### DESCRIPTION OF EMBODIMENTS

<<Oligonucleotide that Allows 27th Exon of Human WRN Gene to be Skipped>>

[0077] The oligonucleotide of the present embodiment is an oligonucleotide that expresses a functional human WRN protein against a skipping mutation in the 26th or 28th exon of a human WRN gene, or a pharmaceutically acceptable salt thereof, wherein
[0078] one nucleotide is bound to another via a phosphate group and/or modified phosphate group in the oligonucleotide,
[0079] the oligonucleotide contains a modified nucleic acid having at least one modified sugar,
[0080] the oligonucleotide is 10 to 30 mer in nucleotide length, and
[0081] the nucleotide sequence of the oligonucleotide is:
[0082] a nucleotide sequence having a sequence identity of 90% or more and 100% or less with a nucleotide sequence complementary to at least one target region having the same nucleotide length as the oligonucleotide in a nucleotide sequence set forth in SEQ ID NO: 1, SEQ ID NO: 2, SEQ ID NO: 3, SEQ ID NO: 4, SEQ ID NO: 5, or SEQ ID NO: 6;
[0083] a nucleotide sequence complementary to a nucleotide sequence formed by deleting, substituting, inserting, or adding one or several nucleotides in the target region; or
[0084] a nucleotide sequence hybridizable with an oligonucleotide having the target region under stringent conditions. It is preferable that the oligonucleotide be a single-stranded antisense oligonucleotide. In the present embodiment, the term “modified nucleic acid having a modified sugar” encompasses morpholino nucleic acid described later.

[0085] The oligonucleotide having the configuration or a pharmaceutically acceptable salt thereof enables skipping of the 27th exon of a human WRN gene. In an aspect of the present embodiment, the oligonucleotide or a pharmaceutically acceptable salt thereof may be regarded as an “oligonucleotide that allows the 27th exon of a human WRN gene to be skipped or a pharmaceutically acceptable salt thereof”. The present invention can ameliorate symptoms of Werner syndrome including refractory skin ulcer by inducing skipping of the 27th exon of a human WRN gene for an mRNA precursor with a displaced amino acid reading frame due to abnormal splicing caused by the skipping mutation c.3139-1G>C in the 26th exon to correct the displacement of the reading frame. The present invention can be applied not only to treatment of Werner syndrome patients possessing the skipping mutation c.3139-1G>C in the 26th exon, but also to treatment of those possessing, for example, any of the skipping mutation c.3233+1G>T in the 26th exon, the skipping mutation c.3233+1G>C in the 26th exon, and the skipping mutation c.IVS28+2T>C in the 28th exon. The details will be described below. The oligonucleotide according to the present embodiment is occasionally expressed as “the antisense oligonucleotide”, “the single-stranded antisense oligonucleotide”, or the like for convenience; however, this is not intended to limit the oligonucleotide according to the present embodiment to such an expression.

### <Definition of Terms, Etc.>

[0086] First, definitions of terms used herein, etc., will be described.

### (WRN Gene)

[0087] In the present embodiment, a “WRN gene” can be defined according to Nature (1992) 355:735-738 (NPL 2) and Am. J. Hum. Genet. (1997) 60:330-341 (NPL 3).

### (Single-Stranded Antisense Oligonucleotide)

[0088] In the present embodiment, a “single-stranded antisense oligonucleotide” or “antisense oligonucleotide” (hereinafter, occasionally referred to as “ASO”) refers to an oligonucleotide complementary to an mRNA, mRNA precursor, or ncRNA (noncoding RNA) (hereinafter, these three are occasionally referred to as “target RNA”, collectively) for a target gene, or a pharmacologically acceptable salt thereof. An antisense oligonucleotide is composed of DNA, RNA, and/or an analog thereof. Antisense oligonucleotides suppress the functions of a targeted mRNA, mRNA precursor, or ncRNA by forming a duplex with the targeted mRNA, mRNA precursor, or ncRNA. Antisense oligonucleotides include those having a nucleotide sequence completely complementary to the nucleotide sequence of an mRNA, mRNA precursor, or ncRNA to be targeted, those having a nucleotide sequence formed by deleting, substituting, inserting, or adding one or several nucleotides in the complementary nucleotide sequence, and those containing bases forming a wobble base pair in the nucleotide sequence.

[0089] The antisense oligonucleotide of the present invention may further contain a modified nucleotide known in the art other than a “modified nucleic acid in which a sugar moiety is a modified sugar” (modified nucleotides with sugar modification) described later. Examples of the modified nucleotide known in the art include not only modified nucleotides with sugar modification, but also modified nucleotides with phosphate group modification and modified nucleotides with nucleobase modification, which will be described later.

[0090] The structure of each end of the antisense oligonucleotide in the present embodiment is not limited, and may be, for example, —OH or —OR (wherein R represents an alkyl chain, a phosphate form, or an additive substance described later).

[0091] The single-stranded antisense oligonucleotide in the present embodiment may be in a single-stranded form, or take a double-stranded form through hybridizing with a second-strand oligonucleotide described later. A double-stranded oligonucleotide consisting of the single-stranded antisense oligonucleotide and a second-strand oligonucleotide hybridizing with the single-stranded antisense oligonucleotide is occasionally referred to as a “double-stranded antisense oligonucleotide”.

### (Oligonucleotide)

[0092] In the present embodiment, an “oligonucleotide” refers to a polymer of nucleotides in which 2 to 30 identical or different nucleotides are linked via phosphoric diester bonds or bonds of another type. The oligonucleotide may be regarded as being composed of a nucleobase moiety, a phosphate moiety, and a sugar moiety or a morpholino ring moiety, as illustrated by the following structural formula.

[chemical structure]

[0093] The oligonucleotides are roughly classified into natural oligonucleotides and non-natural oligonucleotides. A “natural oligonucleotide” refers to an oligonucleotide consisting of naturally occurring nucleotides. A “non-natural oligonucleotide” refers to an oligonucleotide containing at least one modified nucleotide, described later, as a constituent unit. Preferred examples of “non-natural oligonucleotides” include modified-sugar derivatives in which a sugar moiety is modified; phosphorothioate derivatives in which one of the non-crosslinking oxygen atoms of a phosphoric diester bond is replaced with a sulfur atom; phosphorodithioate derivatives in which the two non-crosslinking oxygen atoms of a phosphoric diester bond are replaced with sulfur atoms; ester derivatives in which a phosphoric diester bond is triesterified; phosphoamide derivatives in which a phosphoric diester bond is amidated; boranophosphate derivatives in which a phosphoric diester bond is boronated; alkylphosphonate (e.g., methylphosphonate, methoxypropylphosphonate) derivatives in which a non-crosslinking oxygen atom in a phosphoric diester bond is substituted with an alkyl group; amide derivatives in which a phosphoric diester bond is replaced with an amide bond; and modified-base derivatives in which a nucleobase is modified. Further preferred examples of the non-natural oligonucleotides include crosslinked modified-sugar derivatives in which a sugar moiety is modified; phosphorothioate derivatives in which one of the non-crosslinking oxygen atoms of a phosphoric diester bond is replaced with a sulfur atom; ester derivatives in which a phosphoric diester bond is esterified; and derivatives in which a sugar moiety is modified to form a modified sugar described later (e.g., a crosslinked sugar), and one of the non-crosslinking oxygen atoms of a phosphoric diester bond is replaced with a sulfur atom or a non-crosslinked oxygen atom of a phosphoric diester bond is substituted with an alkyl group to form an alkylphosphonate.

### (Nucleoside)

[0094] In the present embodiment, a “nucleoside” refers to a compound in which a purine base or pyrimidine base and a sugar are bonding together. A naturally occurring nucleoside is occasionally referred to as a “natural nucleoside”. A not naturally occurring modified nucleoside is occasionally referred to as a “modified nucleoside”. In particular, a modified nucleoside in which the sugar moiety is modified is occasionally referred to as a “modified-sugar nucleoside”.

### (Nucleotide)

[0095] In the present embodiment, a “nucleotide” refers to a compound in which a phosphate group is bonding to the sugar of the nucleoside. A naturally occurring nucleotide is occasionally referred to as a “natural nucleotide”. Not naturally occurring, modified nucleotides are occasionally referred to as “modified nucleotides” or a “modified nucleic acid”. Examples of the “modified nucleotides” or “modified nucleic acid” include compounds in which a phosphate group is bonding to the sugar moiety of any of the modified nucleosides, and compounds in which a modified phosphate group described later is bonding to the sugar moiety of a natural nucleoside.

### (Sugar Modification, Modified Sugar)

[0096] In the present embodiment, “sugar modification” means that the sugar moiety of the nucleotide is modified. A modified sugar moiety is occasionally referred to as a “modified sugar”. Modified nucleotides subjected to sugar modification are applicable to a modified nucleic acid, and examples thereof include 2′-O-alkylated nucleic acid, 2′-F-nucleic acid, 5′-methylated nucleic acid, 2′,4′-BNA (bridged nucleic acid, hereinafter, occasionally referred to as “LNA”), AmNA (amide-crosslinked artificial nucleic acid, amido-bridged nucleic acid), GuNA (guanidine-crosslinked artificial nucleic acid, guanidino-bridged nucleic acid), scpBNA (2′-O,4′-C-spirocyclopropylene-bridged nucleic acid), ENA (2′-O,4′-C-ethylene-bridged nucleic acid), and S-cEt (2′,4′-constrained ethyl nucleic acid).

[0097] Examples of the 2′-O-alkylated nucleic acid include those including structures denoted by the symbols “A(M)”, “A(m)”, “C(M)”, “5(m)”, “G(M)”, “G(m)”, “U(M)”, and “T(m)” shown later. Examples of the LNA include those including structures denoted by the symbols “A(L)”, “5(L)”, “G(L)”, and “T(L)” shown later. Examples of the AmNA include those including structures denoted by the symbols “A(Y)”, “5(Y)”, “G(Y)”, and “T(Y)” shown later. Examples of the GuNA include those including structures denoted by the symbols “A(Gx)”, “5(Gx)”, “G(Gx)”, and “T(Gx)” shown later. Examples of the scpBNA include those including structures denoted by the symbols “A(S)”, “5(S)”, “G(S)”, and “T(S)” shown later.

[0098] In an aspect of the present embodiment, it is preferable that modification of a sugar constituting the oligonucleotide be made to form a group represented by a formula (A1) below. In another aspect of the present embodiment, a modified sugar constituting the oligonucleotide may be regarded as being represented by the following formula (A1).

[chemical structure]

[0099] In the formula, Bx is a nucleobase, being independently in each occurrence a group formed from adenine, guanine, cytosine, 5-methylcytosine, thymine, or uracil; X is a phosphate bond, being independently in each occurrence a phosphodiester bond, a phosphorothioate bond, a phosphorodithioate bond, a phosphoamidate bond, a boranophosphate bond, or an alkylphosphonate bond; Y is independently in each occurrence a hydrogen atom, a hydroxy group, a fluorine atom, an optionally substituted alkoxy group having one to six carbon atoms, or an optionally substituted amino group; and Z is independently in each occurrence a hydrogen atom, or an alkyl group having one to five carbon atoms and optionally having a carbon-oxygen double bond or a cyclic structure, or a certain carbon atom in the alkyl group and Y are taken together to form a ring. Here, the “alkyl group having one to five carbon atoms” may be regarded as a monovalent group formed by a certain carbon atom of an alkylene group having one to five carbon atoms and a hydrogen atom together.

[0100] Examples of the “optionally substituted alkoxy group having one to six carbon atoms” include unsubstituted alkoxy groups having one to six carbon atoms, and alkoxy groups having one to six carbon atoms and substituted with a substituent selected from the group consisting of a hydroxy group, a fluorine atom, a linear or branched alkoxy group having one to six carbon atoms, a cyclic alkoxy group having three to eight carbon atoms, a carbamoyl group, and an alkylamide group having one to eight carbon atoms (a group represented by —(CO)—NR⁷R⁸). Here, R⁷ and R⁸ each independently represent a hydrogen atom, or a linear or branched alkyl group having one to eight carbon atoms.

[0101] Examples of the “optionally substituted amino group” include an unsubstituted amino group, and amino groups substituted with a substituent selected from the group consisting of a linear or branched alkyl group having one to six carbon atoms (the alkyl group is optionally substituted with a linear or branched alkoxy group having one to six carbon atoms, or a group represented by —(CO)—NR⁹R¹⁰), a cyclic alkyl group having three to eight carbon atoms, an acyl group having one to six carbon atoms, and an amidine group substituted at one to three positions with a linear or branched alkyl group having one to six carbon atoms. Here, R⁹ and R¹⁰ each independently represent a hydrogen atom, or a linear or branched alkyl group having one to six carbon atoms.

[0102] Examples of the “alkyl group having one to five carbon atoms and optionally having a carbon-oxygen double bond or a cyclic structure” include unsubstituted alkyl groups having one to five carbon atoms, alkyl groups having one to five carbon atoms with a carbon-oxygen double bond, and cycloalkyl groups having three to five carbon atoms (such as a cyclopropyl group). Here, the number of carbon atoms in the “alkyl groups having one to five carbon atoms with a carbon-oxygen double bond” may include the carbon atom constituting the carbon-oxygen double bond. Accordingly, in the present embodiment, the “alkyl groups having one to five carbon atoms with a carbon-oxygen double bond” can include an aldehyde group. In the case that Z is an aldehyde group and Y is an optionally substituted amino group, the ring formed by Y and Z together may have a structure including an amide bond.

[0103] In an aspect of the present embodiment, it is preferable that modification of a sugar constituting the oligonucleotide be made to form a group represented by a formula (A2) or formula (A3) below. In another aspect of the present embodiment, a modified sugar constituting the oligonucleotide may be regarded as being represented by the following formula (A2) or formula (A3).

[chemical structure]

[0104] In the formulas, Bx is a nucleobase, being independently in each occurrence a group formed from adenine, guanine, cytosine, 5-methylcytosine, thymine, or uracil; X is a phosphate bond, being independently in each occurrence a phosphodiester bond, a phosphorothioate bond, a phosphorodithioate bond, a phosphoamidate bond, a boranophosphate bond, or an alkylphosphonate bond; R⁴ is independently in each occurrence a hydrogen atom or an optionally substituted alkyl group having one to six carbon atoms; Y′ is an oxygen atom or an optionally substituted nitrogen atom; R⁵ and R⁶ are each independently in each occurrence a hydrogen atom or an optionally substituted alkyl group having one to six carbon atoms, or R⁵ and R⁶ are taken together to form a carbonyl group or a ring; and n is 0 or 1.

[0105] In another aspect of the present embodiment, it is preferable that modification of a sugar constituting the oligonucleotide be made to form a group represented by the formula (A2), and the R⁴ be independently in each occurrence a methyl group, a methoxyethyl group, or an N-methylpropanamide group (—CH₂CH₂—CONH—CH₃, a methyliminocarbonylethyl group).

[0106] In another aspect of the present embodiment, it is preferable that modification of a sugar constituting the oligonucleotide be made to form a group represented by the formula (A3), the Y′ be an oxygen atom, or a nitrogen atom optionally substituted with a hydrogen atom, a methyl group, a methoxyethyl group, or an N-methylpropanamide group, the R⁵ and R⁶ be each independently in each occurrence a hydrogen atom, an alkyl group having one or two carbon atoms, or the R⁵ and R⁶ be taken together to form a carbonyl group or a ring having three to six carbon atoms, and n be 0 or 1.

(Modification of Nucleotide Known in the Art Other than Sugar Modification)

[0107] Modification of a nucleotide known in the art other than the sugar modification is applicable to a modified nucleic acid for producing the single-stranded antisense oligonucleotide of the present invention. Known as modification of a nucleotide are phosphate group modification and nucleobase modification described later. Examples of such modifications of a nucleotide include modification of nucleotides described in J. Med. Chem. (2016) 59:9645-9667 (NPL 5). Each of those modifications of a nucleotide can be performed according to a method known in the art, which is described in a literature cited in that literature.

### (Phosphate Group)

[0108] In the present embodiment, a “phosphate group” refers to such a group that the binding mode of the phosphate moiety of the nucleotide is a naturally occurring phosphodiester bond (a bond denoted by the symbol “—” shown later).

### (Phosphate Group Modification, Modified Phosphate Group)

[0109] In the present embodiment, “phosphate group modification” means that the phosphate moiety of the nucleotide is modified. In particular, a modified phosphate moiety is occasionally referred to as a “modified phosphate group”. Examples of the binding mode including the modified phosphate group include a phosphorothioate bond (a bond denoted by the symbol “\hat{ }” shown later), a phosphorodithioate bond, a phosphoamidate bond, or a boranophosphate bond, an alkylphosphonate bond, a phosphorodiamidate bond (a bond denoted by the symbol “*” shown later), a phosphorodiamidothioate bond, and a phosphorodiamidodithioate bond.

### (Nucleobase Modification, Modified Nucleobase)

[0110] In the present embodiment, “nucleobase modification” means that a nucleobase moiety of the nucleotide is modified. In particular, a modified nucleobase moiety is occasionally referred to as a “modified nucleobase”. Examples of the modified nucleobase include 5-methylcytosine, 5-hydroxymethylcytosine, and 5-propynylcytosine.

### (Analog of DNA or RNA)

[0111] The analog of DNA or RNA refers to a molecule having a structure similar to that of DNA or RNA. Examples thereof include peptide nucleic acid (pNA) and morpholino nucleic acid.

[0112] For the nucleic acid to be used in the present invention, not only nucleic acids with in which a sugar moiety is modified but also morpholino nucleic acids and peptide nucleic acids may be used.

[0113] Thus, in another mode of the single-stranded antisense oligonucleotide of the present invention, the oligonucleotides corresponding to the sequences listed in the column <Nucleotide sequence of single-stranded antisense oligonucleotide> shown later may be each composed of an analog of DNA or RNA. Such an analog of DNA or RNA at least contains a peptide nucleic acid or morpholino nucleic acid. Synthesis of the antisense oligonucleotide of the present invention containing a peptide nucleic acid or morpholino nucleic acid is performed according to a common, conventional method. For example, a morpholino oligonucleic acid can be produced according to WO 1991/009033 (PTL 4), WO 2009/064471 (PTL 5), or J. Am. Chem. Soc (2016) 138:15663-15672 (NPL 8). Examples of the morpholino nucleic acid include those including structures denoted by the symbols “A(N)”, “C(N)”, “G(N)”, and “T(N)” shown later.

[0114] In an aspect of the present embodiment, it is preferable that the oligonucleotide be a morpholino oligonucleic acid composed of a morpholino nucleic acid represented by the following formula (A4).

[chemical structure]

[0115] In the formula, Bx is a nucleobase, being independently in each occurrence a group formed from adenine, guanine, cytosine, 5-methylcytosine, thymine, or uracil; and X′ is a phosphate bond, being independently in each occurrence a phosphorodiamidate bond, a phosphorodiamidothioate bond, or a phosphorodiamidodithioate bond.

(ncRNA)

[0116] In the present embodiment, “ncRNA” is a collective term for RNA not involved in translation of proteins. Examples of the ncRNA include ribosomal RNA, transfer RNA, miRNA, and natural antisense transcripts (NAT).

### (Nucleobase Moieties of Oligonucleotide)

[0117] Examples of nucleobase moieties of the oligonucleotide include a thyminyl group, a cytosinyl group, an adeninyl group, a guaninyl group, a 5-methylcytosinyl group, a uracilyl group, a 2-oxo-4-hydroxy-5-methyl-1,2-dihydropyrimidin-1-yl group, a 2-oxo-4-amino-1,2-dihydropyrimidin-1-yl group, a 4-amino-5-methyl-2-oxo-1,2-dihydropyrimidin-1-yl group, and a 2-oxo-4-hydroxy-1,2-dihydropyrimidin-1-yl group. Preferred examples of the nucleobase moieties include a thyminyl group, a cytosinyl group, an adeninyl group, a guaninyl group, a 5-methylcytosinyl group, and a uracilyl group. Among the nucleobases, uracil (U) and thymine (T) are compatible with each other. Both uracil (U) and thymine (T) are capable of forming a base pair with adenine (A) in the complementary strand. The same also applies to nucleobase moieties of the antisense oligonucleotide.

### (Target RNA)

[0118] In the present embodiment, “target RNA” refers to RNA to which the single-stranded antisense oligonucleotide is to bind. In other words, the target RNA in the present embodiment refers to an mRNA precursor for a WRN gene. Examples of the target RNA include an mRNA precursor having a nucleotide sequence set forth in SEQ ID NO: 2 for a human WRN gene, an mRNA precursor having a nucleotide sequence set forth in any of SEQ ID NOs: 3 to 5 for a human WRN gene with an exon 26 skip mutation, and an mRNA precursor having a nucleotide sequence set forth in SEQ ID NO: 6 for a human WRN gene with an exon 28 skip mutation.

### (Binding to Target RNA)

[0119] In the present embodiment, “binding to target RNA” means that nucleobases of a single-stranded antisense oligonucleotide form a double-stranded nucleic acid together with nucleobases of target RNA through the complementarity to the target RNA. It is enough for the double-stranded nucleic acid to be formed in at least part of the target RNA. The strength of binding to the target RNA can be measured, for example, on the basis of an indicator of thermal stability. Examples of the indicator of thermal stability include the melting temperature (Tm value) of the double-stranded nucleic acid. The Tm value is preferably 40 to 90° C., and more preferably 50 to 70° C.

### (Target Region)

[0120] The target region refers to a region of an mRNA precursor for a WRN gene where binding to the single-stranded antisense oligonucleotide occurs. Such target regions include target regions each consisting of a nucleotide sequence listed, and regions on an mRNA precursor for WRN.

(mRNA Precursor)

[0121] The mRNA precursor refers to a primary transcript of RNA transcribed from DNA. That is, the mRNA precursor is RNA containing exon regions, intron regions, and untranslated regions (UTR). The mRNA precursor may be regarded as RNA before being subjected to post-transcriptional splicing. After being spliced, the mRNA precursor becomes mRNA.

### (Binding to Target Region)

[0122] Binding to the target region means that the single-stranded antisense oligonucleotide of the present invention forms a duplex with the target region. However, the single-stranded antisense oligonucleotide of the present invention does not always need to form a duplex with the whole target region, and it is enough for the single-stranded antisense oligonucleotide of the present invention to form a duplex with a partial region of the target region. Thus, it is preferable that the single-stranded antisense oligonucleotide of the present invention have complete complementarity to the target region, but it is enough for the single-stranded antisense oligonucleotide of the present invention to be complementary to at least a partial region of the target region, to the extent that the single-stranded antisense oligonucleotide of the present invention binds to the target region of WRN.

### (Part of Target Region)

[0123] A part of the target region refers to a region of 10 to 15 nucleotides in nucleotide length in the target region.

### (Being Complementary to at Least Part of Target Region)

[0124] Being complementary to at least part of the target region means being complementary to nucleotides in at least a partial region of the target region on the target RNA. Here, such situation also includes being complementary to nucleotides in a region on the mRNA precursor corresponding to at least the partial region.

[0125] The present inventors focused on splicing-switching antisense oligonucleotides, and examined to discover an antisense oligonucleotide that induces skipping of exon 27 of a human WRN gene.

### <Design of Single-Stranded Antisense Oligonucleotide>

[0126] The single-stranded antisense oligonucleotide is a compound that enables restoration of an abnormalized reading frame in abnormal RNA, for example, due to frameshift, and is for allowing an exon as a target region to be skipped. Accordingly, the structure of the antisense oligonucleotide is designed so as to bind to the target region of target RNA, and, in addition, a sugar moiety-modified nucleic acid is disposed so as not to be recognized by nucleases such as RNase H.

### <Nucleotide Sequence of Single-Stranded Antisense Oligonucleotide>

[0127] It is preferable that the nucleotide sequence of the single-stranded antisense oligonucleotide according to the present embodiment be:
[0128] (A) a nucleotide sequence having a sequence identity of 90% or more and 100% or less with a nucleotide sequence complementary to a target region composed of continuous 10 to 30 mer (preferably 15 to 25 mer) starting from a nucleotide at any of positions 1 to 40, 46, 51, 56, and 62 to 63 counted from a 5′ end in a nucleotide sequence set forth in SEQ ID NO: 1 or a target region composed of continuous 15 to 25 mer starting from a nucleotide at any of positions 108873, 108878 to 108917, 108923, 108928, 108933, and 108939 to 108940 counted from a 5′ end in a nucleotide sequence set forth in SEQ ID NO: 2;
[0129] (B) a nucleotide sequence complementary to a nucleotide sequence formed by deleting, substituting, inserting, or adding one or several nucleotides in the target region; or
[0130] (C) a nucleotide sequence hybridizable with an oligonucleotide having the target region under stringent conditions.

[0131] In the present embodiment, nucleotide sequences listed in sequence listings are used for showing only sequence information on nucleobase moieties. Structural information on oligonucleotides including sugar moieties and phosphate moieties in addition to nucleobase moieties is shown in a description format shown later in Table 2-1 to Table 2-7.

[0132] In the present embodiment, “sequence identity” refers to the proportion (%) of identical nucleotides in the whole overlapping nucleotide sequence in an optimum alignment when two nucleotide sequences are aligned by using a mathematical algorithm known in the art (preferably, the algorithm is capable of considering introduction of a gap into one or both of the sequences for optimum alignment). Those skilled in the art can check the “sequence identity” of a nucleotide sequence with ease. For example, NCBI BLAST (National Center for Biotechnology Information Basic Local Alignment Search Tool) can be used.

[0133] The nucleotide sequence of the single-stranded antisense oligonucleotide according to the present embodiment preferably has a sequence identity of 95% or more and 100% or less, more preferably has a sequence identity of 98% or more and 100% or less, further preferably has a sequence identity of 100%, with a nucleotide sequence complementary to the specific target region described above in a nucleotide sequence set forth in SEQ ID NO: 1.

[0134] In the present embodiment, the “nucleotide sequence formed by deleting, substituting, inserting, or adding one or several nucleotides” is, for example, a nucleotide sequence provided by the deletion, substitution, insertion, or addition with a sequence identity of 80% or more, 85% or more, 90% or more, 95% or more, 97% or more, 98% or more, or 99% or more with the nucleotide sequence before the deletion, substitution, insertion, or addition. Regarding the specific number of “one or several nucleotides”, the deletion, substitution, insertion, and addition may occur each independently or in any combination at one position, two positions, three positions, four position, or five positions.

[0135] In the present embodiment, “stringent conditions” are such conditions that incubation is performed in a solution containing 6×SSC (composition of 1×SSC: 0.15 M NaCl, 0.015 M sodium citrate, pH 7.0), 0.5% SDS, 5×Denhardt's solution, 100 μg/mL modified salmon sperm DNA, and 50% (v/v) formamide at room temperature for 12 hours, and washing is further performed with 0.5×SSC at a temperature of 50° C. or more. Furthermore included are more stringent conditions, for example, more severe conditions such as incubating at 45° C. or 60° C. for 12 hours, washing with 0.2×SSC or 0.1×SSC, and washing under a temperature condition of 60° C. or 65° C. or more in washing.

[0136] In an aspect of the present embodiment, it is preferable that the nucleotide sequence of the single-stranded antisense oligonucleotide be a nucleotide sequence complementary to a target region composed of continuous 15 to 25 mer starting from a nucleotide at any of positions 1 to 40, 46, 51, 56, and 62 to 63 counted from a 5′ end in a nucleotide sequence set forth in SEQ ID NO: 1 or a target region composed of continuous 15 to 25 mer starting from a nucleotide at any of positions 108873, 108878 to 108917, 108923, 108928, 108933, and 108939 to 108940 counted from a 5′ end in a nucleotide sequence set forth in SEQ ID NO: 2.

[0137] In an aspect of the present embodiment, it is more preferable that the nucleotide sequence of the single-stranded antisense oligonucleotide be a nucleotide sequence complementary to a target region composed of continuous 15 to 25 mer starting from a nucleotide at any of positions 1 to 32, 34 to 40, 46, 51, and 62 to 63 counted from a 5′ end in a nucleotide sequence set forth in SEQ ID NO: 1 or a target region composed of continuous 15 to 25 mer starting from a nucleotide at any of positions 108878 to 108909, 108911 to 108917, 108923, 108928, and 108939 to 108940 counted from a 5′ end in a nucleotide sequence set forth in SEQ ID NO: 2.

[0138] In an aspect of the present embodiment, it is further preferable that the nucleotide sequence of the single-stranded antisense oligonucleotide be a nucleotide sequence complementary to a target region composed of continuous 15 to 25 mer starting from a nucleotide at any of positions 1, 3, 5 to 12, 14 to 19, 21, 25, 29, 30, 31, 34, 46, and 51 counted from a 5′ end in a nucleotide sequence set forth in SEQ ID NO: 1 or a target region composed of continuous 15 to 25 mer starting from a nucleotide at any of positions 108878, 108880, 108882 to 108889, 108891 to 108896, 108898, 108902, 108906 to 108908, 108911, 108923, and 108928 counted from a 5′ end in a nucleotide sequence set forth in SEQ ID NO: 2.

[0139] The single-stranded antisense oligonucleotide is capable of binding to the target region of a WRN gene. Herein, “binding to the target region of a WRN gene” for the single-stranded antisense oligonucleotide of the present invention encompasses direct binding of the single-stranded antisense oligonucleotide of the present invention to an mRNA precursor for WRN.

[0140] A mode of the single-stranded antisense oligonucleotide of the present invention is a single-stranded antisense oligonucleotide that allows exon 27 of a WRN gene to be skipped and has any nucleotide sequence shown in Table 1-1 to Table 1-4, wherein the single-stranded oligonucleotide is complementary to a target region in an mRNA precursor for a human WRN gene.

[0141] The single-stranded antisense oligonucleotide may have an extension of one to five nucleotides in either one or each of the 3′ side and the 5′ side as long as the single-stranded antisense oligonucleotide contains a nucleotide sequence shown in Table 1-1 to Table 1-4. The target region can be said to be a region associated particularly with regulation of expression of a human WRN gene (e.g., a region having an mRNA secondary structure that allows the antisense nucleotide to bind thereto with ease) in an mRNA precursor for human WRN. In the case that Position of 5′ end in SEQ ID NO: 1 is “5” and Position of 3′ end therein is “24” in Table 1-1, for example, a nucleotide sequence of continuous 20 mer from the 5th to the 24th counted from the 5′ end in the nucleotide sequence set forth in SEQ ID NO: 1 (corresponding to exon 27 in SEQ ID NO: 2) is the target region in exon 27 for human WRN targeted by the corresponding single-stranded antisense oligonucleotide (Sequence name: “5-20”). In the case that Position of 5′ end in SEQ ID NO: 1 is “(−)5” and Position of 3′ end therein is “15” in Table 1-1, a nucleotide sequence of 20 mer from the 5th nucleotide being in an intron region that binds to the 5′ end and counted from the position that binds to exon 27 to the 15th in exon 27 in the nucleotide sequence set forth in SEQ ID NO: 1 (corresponding to exon 27 in SEQ ID NO: 2) is the target region in in exon 27 for human WRN targeted by the corresponding single-stranded antisense oligonucleotide (Sequence name: “(−)5-20”).

TABLE 1-1

| | | Target region of | | Target region of | |
|---|---|---|---|---|---|
| | | SEQ ID NO: 1 | | SEQ ID NO: 2 | |
| Sequence | Nucleotide sequence (5′-3′) of antisense | Position | Position | Position | Position |
| name | oligonucleotide | of 5′ end | of 3′ end | of 5′ end | of 3′ end |
| (-)10-20 | A′G′T′T′T′T′C′G′A′A′C′T′A′A′A′A′A′A′TA′ | −10 | 10 | 108868 | 108887 |
| (-)5-20 | G′A′T′A′C′A′G′T′T′T′T′C′G′A′A′C′T′A′A′A′ | −5 | 15 | 108873 | 108892 |
| 1-20 | C′C′G′A′A′G′A′T′A′C′A′G′T′T′T′T′C′G′A′A′ | 1 | 20 | 108878 | 108897 |
| 2-20 | C′C′C′G′A′A′G′A′T′A′C′A′G′T′T′T′T′C′G′A′ | 2 | 21 | 108879 | 108898 |
| 3-20 | G′C′C′C′G′A′A′G′A′T′A′C′A′G′T′T′T′T′C′G′ | 3 | 22 | 108880 | 108899 |
| 4-20 | T′G′C′C′C′G′A′A′G′A′T′A′C′A′G′T′T′T′T′C′ | 4 | 23 | 108881 | 108900 |
| 5-20 | G′T′G′C′C′C′G′A′A′G′A′T′A′C′A′G′T′T′T′T′ | 5 | 24 | 108882 | 108901 |
| 6-20 | G′G′T′G′C′C′C′G′A′A′G′A′T′A′C′A′G′T′T′T′ | 6 | 25 | 108883 | 108902 |
| 7-20 | T′G′G′T′G′C′C′C′G′A′A′G′A′T′A′C′A′G′T′T′ | 7 | 26 | 108884 | 108903 |
| 8-20 | T′T′G′G′T′G′C′C′C′G′A′A′G′A′T′A′C′A′G′T′ | 8 | 27 | 108885 | 108904 |
| 9-20 | T′T′T′G′G′T′G′C′C′C′G′A′A′G′A′T′A′C′A′G′ | 9 | 28 | 108886 | 108905 |
| 10-20 | C′T′T′T′G′G′T′G′C′C′C′G′A′A′G′A′T′A′C′A′ | 10 | 29 | 108887 | 108906 |
| 11-20 | T′C′T′T′T′G′G′T′G′C′C′C′G′A′A′G′A′T′A′C′ | 11 | 30 | 108888 | 108907 |
| 12-20 | C′T′C′T′T′T′G′G′T′G′C′C′C′G′A′A′G′A′T′A′ | 12 | 31 | 108889 | 108908 |
| 13-20 | G′C′T′C′T′T′T′G′G′T′G′C′C′C′G′A′A′G′A′T′ | 13 | 32 | 108890 | 108909 |
| 14-20 | T′G′C′T′C′T′T′T′G′G′T′G′C′C′C′G′A′A′G′A′ | 14 | 33 | 108891 | 108910 |
| 15-20 | A′T′G′C′T′C′T′T′T′G′G′T′G′C′C′C′G′A′A′G′ | 15 | 34 | 108892 | 108911 |
| 16-20 | A′A′T′G′C′T′C′T′T′T′G′G′T′G′C′C′C′G′A′A′ | 16 | 35 | 108893 | 108912 |
| 17-20 | C′A′A′T′G′C′T′C′T′T′T′G′G′T′G′C′C′C′G′A′ | 17 | 36 | 108894 | 108913 |
| 18-20 | A′C′A′A′T′G′C′T′C′T′T′T′G′G′T′G′C′C′C′G′ | 18 | 37 | 108895 | 108914 |
| 19-20 | A′A′C′A′A′T′G′C′T′C′T′T′T′G′G′T′G′C′C′C′ | 19 | 38 | 108896 | 108915 |
| 20-20 | T′A′A′C′A′A′T′G′C′T′C′T′T′T′G′G′T′G′C′C′ | 20 | 39 | 108897 | 108916 |
| 21-20 | A′T′A′A′C′A′A′T′G′C′T′C′T′T′T′G′G′T′G′C′ | 21 | 40 | 108898 | 108917 |
| 22-20 | T′A′T′A′A′C′A′A′T′G′C′T′C′T′T′T′G′G′T′G′ | 22 | 41 | 108899 | 108918 |
| 23-20 | T′T′A′T′A′A′C′A′A′T′G′C′T′C′T′T′T′G′G′T′ | 23 | 42 | 108900 | 108919 |

TABLE 2

| | | Target region of | | Target region of | |
|---|---|---|---|---|---|
| | | SEQ ID NO: 1 | | SEQ ID NO: 2 | |
| Sequence | Nucleotide sequence (5′-3′) of antisense | Position | Position | Position | Position |
| name | oligonucleotide | of 5′ end | of 3′ end | of 5′ end | of 3′ end |
| 24-20 | A′T′T′A′T′A′A′C′A′A′T′G′C′T′C′T′T′T′G′G′ | 24 | 43 | 108901 | 108920 |
| 25-20 | G′A′T′T′A′T′A′A′C′A′A′T′G′C′T′C′T′T′T′G′ | 25 | 44 | 108902 | 108921 |
| 26-20 | T′G′A′T′T′A′T′A′A′C′A′A′T′G′C′T′C′T′T′T′ | 26 | 45 | 108903 | 108922 |
| 27-20 | T′T′G′A′T′T′A′T′A′A′C′A′A′T′G′C′T′C′T′T′ | 27 | 46 | 108904 | 108923 |
| 28-20 | C′T′T′G′A′T′T′A′T′A′A′C′A′A′T′G′C′T′C′T′ | 28 | 47 | 108905 | 108924 |
| 29-20 | A′C′T′T′G′A′T′T′A′T′A′A′C′A′A′T′G′C′T′C′ | 29 | 48 | 108906 | 108925 |
| 30-20 | T′A′C′T′T′G′A′T′T′A′T′A′A′C′A′A′T′G′C′T′ | 30 | 49 | 108907 | 108926 |
| 31-20 | G′T′A′C′T′T′G′A′T′T′A′T′A′A′C′A′A′T′G′C′ | 31 | 50 | 108908 | 108927 |
| 32-20 | G′G′T′A′C′T′T′G′A′T′T′A′T′A′A′C′A′A′T′G′ | 32 | 51 | 108909 | 108928 |
| 33-20 | T′G′G′T′A′C′T′T′G′A′T′T′A′T′A′A′C′A′A′T′ | 33 | 52 | 108910 | 108929 |
| 34-20 | C′T′G′G′T′A′C′T′T′G′A′T′T′A′T′A′A′C′A′A′ | 34 | 53 | 108911 | 108930 |
| 35-20 | A′C′T′G′G′T′A′C′T′T′G′A′T′T′A′T′A′A′C′A′ | 35 | 54 | 108912 | 108931 |
| 36-20 | A′A′C′T′G′G′T′A′C′T′T′G′A′T′T′A′T′A′A′C′ | 36 | 55 | 108913 | 108932 |
| 37-20 | C′A′A′C′T′G′G′T′A′C′T′T′G′A′T′T′A′T′A′A′ | 37 | 56 | 108914 | 108933 |
| 38-20 | T′C′A′A′C′T′G′G′T′A′C′T′T′G′A′T′T′A′T′A′ | 38 | 57 | 108915 | 108934 |
| 39-20 | T′T′C′A′A′C′T′G′G′T′A′C′T′T′G′A′T′T′A′T′ | 39 | 58 | 108916 | 108935 |
| 40-20 | A′T′T′C′A′A′C′T′G′G′T′A′C′T′T′G′A′T′T′A′ | 40 | 59 | 108917 | 108936 |
| 41-20 | A′A′T′T′C′A′A′C′T′G′G′T′A′C′T′T′G′A′T′T′ | 41 | 60 | 108918 | 108937 |
| 46-20 | T′A′C′T′T′A′A′T′T′C′A′A′C′T′G′G′T′A′C′T | 46 | 65 | 108923 | 108942 |
| 51-20 | C′T′C′T′G′T′A′C′T′T′A′A′T′T′C′A′A′C′T′G′ | 51 | 70 | 108928 | 108947 |
| 56-20 | T′T′C′T′T′C′T′C′T′G′T′A′C′T′T′A′A′T′T′C′ | 56 | 75 | 108933 | 108952 |
| 62-20 | C′A′A′A′C′C′T′T′C′T′T′C′T′C′T′G′T′A′C′T′ | 62 | 81 | 108939 | 108958 |
| 63-20 | A′C′A′A′A′C′C′T′T′C′T′T′C′T′C′T′G′T′A′C′ | 63 | 82 | 108940 | 108959 |
| 66-20 | A′A′A′A′C′A′A′A′C′C′T′T′C′T′T′C′T′C′T′G′ | 66 | 85 | 108943 | 108962 |
| 70-20 | C′T′T′T′A′A′A′A′C′A′A′A′C′C′T′T′C′T′T′C′ | 70 | 89 | 108947 | 108966 |

TABLE 1-3

| | | Target region of | | Target region of | |
|---|---|---|---|---|---|
| | | SEQ ID NO: 1 | | SEQ ID NO: 2 | |
| Sequence | Nucleotide sequence (5′-3′) of | Position | Position | Position | Position |
| name | antisense oligonucleotide | of 5′ end | of 3′ end | of 5′ end | of 3′ end |
| 1-15 | G′A′T′A′C′A′G′T′T′T′T′C′G′A′A′ | 1 | 15 | 108878 | 108892 |
| 2-15 | A′G′A′T′A′C′A′G′T′T′T′T′C′G′A′ | 2 | 16 | 108879 | 108893 |
| 3-15 | A′A′G′A′T′A′C′A′G′T′T′T′T′C′G′ | 3 | 17 | 108880 | 108894 |
| 4-15 | G′A′A′G′A′T′A′C′A′G′T′T′T′T′C′ | 4 | 18 | 108881 | 108895 |
| 5-15 | C′G′A′A′G′A′T′A′C′A′G′T′T′T′T′ | 5 | 19 | 108882 | 108896 |
| 6-15 | C′C′G′A′A′G′A′T′A′C′A′G′T′T′T′ | 6 | 20 | 108883 | 108897 |
| 7-15 | C′C′C′G′A′A′G′A′T′A′C′A′G′T′T′ | 7 | 21 | 108884 | 108898 |
| 8-15 | G′C′C′C′G′A′A′G′A′T′A′C′A′G′T′ | 8 | 22 | 108885 | 108899 |
| 9-15 | T′G′C′C′C′G′A′A′G′A′T′A′C′A′G′ | 9 | 23 | 108886 | 108900 |
| 10-15 | G′T′G′C′C′C′G′A′A′G′A′T′A′C′A′ | 10 | 24 | 108887 | 108901 |
| 11-15 | G′G′T′G′C′C′C′G′A′A′G′A′T′A′C′ | 11 | 25 | 108888 | 108902 |
| 12-15 | T′G′G′T′G′C′C′C′G′A′A′G′A′T′A′ | 12 | 26 | 108889 | 108903 |
| 13-15 | T′T′G′G′T′G′C′C′C′G′A′A′G′A′T′ | 13 | 27 | 108890 | 108904 |
| 14-15 | T′T′T′G′G′T′G′C′C′C′G′A′A′G′A′ | 14 | 28 | 108891 | 108905 |
| 15-15 | C′T′T′T′G′G′T′G′C′C′C′G′A′A′G′ | 15 | 29 | 108892 | 108906 |
| 16-15 | T′C′T′T′T′G′G′T′G′C′C′C′G′A′A′ | 16 | 30 | 108893 | 108907 |
| 17-15 | C′T′C′T′T′T′G′G′T′G′C′C′C′G′A′ | 17 | 31 | 108894 | 108908 |
| 18-15 | G′C′T′C′T′T′T′G′G′T′G′C′C′C′G′ | 18 | 32 | 108895 | 108909 |
| 19-15 | T′G′C′T′C′T′T′T′G′G′T′G′C′C′C′ | 19 | 33 | 108896 | 108910 |
| 20-15 | A′T′G′C′T′C′T′T′T′G′G′T′G′C′C′ | 20 | 34 | 108897 | 108911 |
| 21-15 | A′A′T′G′C′T′C′T′T′T′G′G′T′G′C′ | 21 | 35 | 108898 | 108912 |

TABLE 1-4

| | | Target region of | | Target region of | |
|---|---|---|---|---|---|
| | | SEQ ID NO: 1 | | SEQ ID NO: 2 | |
| | | Position | Position | Position | Position |
| Sequence | Nucleotide sequence (5′-3′) of antisense | of 5′ | of 3′ | of 5′ | of 3′ |
| name | oligonucleotide | end | end | end | end |
| 1-25 | G′G′T′G′C′C′C′G′A′A′G′A′T′A′C′A′G′T′T′T′T′C′G′A′A′ | 1 | 25 | 108878 | 108902 |
| 3-25 | T′T′G′G′T′G′C′C′C′G′A′A′G′A′T′A′C′A′G′T′T′T′T′C′G′ | 3 | 27 | 108880 | 108904 |
| 5-25 | C′T′T′T′G′G′T′G′C′C′C′G′A′A′G′A′T′A′C′A′G′T′T′T′T′ | 5 | 29 | 108882 | 108906 |
| 7-25 | C′T′C′T′T′T′G′G′T′G′C′C′C′G′A′A′G′A′T′A′C′A′G′T′T′ | 7 | 31 | 108884 | 108908 |
| 9-25 | T′G′C′T′C′T′T′T′G′G′T′G′C′C′C′G′A′A′G′A′T′A′C′A′G′ | 9 | 33 | 108886 | 108910 |
| 11-25 | A′A′T′G′C′T′C′T′T′T′G′G′T′G′C′C′C′G′A′A′G′A′T′A′C′ | 11 | 35 | 108888 | 108912 |
| 15-25 | T′A′A′C′A′A′T′G′C′T′C′T′T′T′G′G′T′G′C′C′C′GA′A′G′ | 15 | 39 | 108892 | 108916 |
| 15-24 | A′A′C′A′A′T′G′C′T′C′T′T′T′G′G′T′G′C′C′C′G′A′A′G′ | 15 | 38 | 108892 | 108915 |
| 15-23 | A′C′A′A′T′G′C′T′C′T′T′T′G′G′T′G′C′C′C′G′A′A′G′ | 15 | 37 | 108892 | 108914 |
| 15-22 | C′A′A′T′G′C′T′C′T′T′T′G′G′T′G′C′C′C′G′A′A′G′ | 15 | 36 | 108892 | 108913 |
| 15-21 | A′A′T′G′C′T′C′T′T′T′G′G′T′G′C′C′C′G′A′A′G′ | 15 | 35 | 108892 | 108912 |
| 15-19 | T′G′C′T′C′T′T′T′G′G′T′G′C′C′C′G′A′A′G′ | 15 | 33 | 108892 | 108910 |
| 15-18 | G′C′T′C′T′T′T′G′G′T′G′C′C′C′G′A′A′G′ | 15 | 32 | 108892 | 108909 |
| 15-17 | C′T′C′T′T′T′G′G′T′G′C′C′C′G′A′A′G′ | 15 | 31 | 108892 | 108908 |
| 15-16 | T′C′T′T′T′G′G′T′G′C′C′C′G′A′A′G′ | 15 | 30 | 108892 | 108907 |
| 16-19 | A′T′G′C′T′C′T′T′T′G′G′T′G′C′C′C′G′A′A′ | 16 | 34 | 108893 | 108911 |
| 16-18 | T′G′C′T′C′T′T′T′G′G′T′G′C′C′C′G′A′A′ | 16 | 33 | 108893 | 108910 |
| 16-17 | G′C′T′C′T′T′T′G′G′T′G′C′C′C′G′A′A′ | 16 | 32 | 108893 | 108909 |
| 16-16 | C′T′C′T′T′T′G′G′T′G′C′C′C′G′A′A′ | 16 | 31 | 108893 | 108908 |
| 10-19 | T′T′T′G′G′T′G′C′C′C′G′A′A′G′A′T′A′C′A′ | 10 | 28 | 108887 | 108905 |
| 10-18 | T′T′G′G′T′G′C′C′C′G′A′A′G′A′T′A′C′A′ | 10 | 27 | 108887 | 108904 |
| 10-17 | T′G′G′T′G′C′C′C′G′A′A′G′A′T′A′C′A′ | 10 | 26 | 108887 | 108903 |
| 10-16 | G′G′T′G′C′C′C′G′A′A′G′A′T′A′C′A′ | 10 | 25 | 108887 | 108902 |
| 12-19 | T′C′T′T′T′G′G′T′G′C′C′C′G′A′A′G′A′T′A′ | 12 | 30 | 108889 | 108907 |
| 12-18 | C′T′T′T′G′G′T′G′C′C′C′G′A′A′G′A′T′A′ | 12 | 29 | 108889 | 108906 |

[0142] In Table 1-1 to Table 1-4 shown above, the sign “A′”, the sign “C′”, the sign “G′”, and the sign “T′” are each selected from the corresponding natural nucleoside (a, c, g ort described later) and modified nucleosides (including modified-sugar nucleosides). For the 2′-O-alkylated nucleic acid among the modified-sugar nucleosides, the sign “A′” indicates one being selected from A(M) and A(m) shown later, the sign “C′” indicates one being selected from C(M) and 5(m) shown later, the sign “G′” indicates one being selected from G(M) and G(m) shown later, and the sign “T′” indicates one being selected from U(M) and T(m) shown later. For crosslinked modified nucleosides, the sign “A′” indicates one being selected from A(L), A(Y), A(Gx), and A(S) shown later, the sign “C′” indicates one being selected from 5(x), 5(L), 5(Y), 5(Gx), and 5(S) shown later, the sign “G′” indicates one being selected from G(L), G(Y), G(Gx), and G(S) shown later, and the sign “T′” indicates one being selected from T(L), T(Y), T(Gx), and T(S) shown later. For the morpholino nucleic acid, the sign “A′” indicates A(N) shown later, the sign “C′” indicates C(N) shown later, the sign “G′” indicates G(N) shown later, and the sign “T′” indicates T(N) shown later.

### <Pharmacologically Acceptable Salt>

[0143] The single-stranded antisense oligonucleotide according to the present embodiment may be in the form of a pharmacologically acceptable salt. Here, the “pharmacologically acceptable salt” refers to a salt of the single-stranded antisense oligonucleotide of the present invention, wherein the salt is a physiologically acceptable salt of the single-stranded antisense oligonucleotide of the present invention, specifically, a salt retaining desired biological activities of the single-stranded antisense oligonucleotide and not retaining undesired toxicological effects thereof. The same also applies to a double-stranded antisense oligonucleotide and antisense oligonucleotide complex described later.

### <Pharmaceutically Acceptable Salt>

[0144] In an aspect of the present embodiment, the single-stranded antisense oligonucleotide may be in the form of a pharmaceutically acceptable salt. Here, the “pharmaceutically acceptable salt” refers to one that is the mentioned pharmacologically acceptable salt and is an acid addition salt or a base addition salt. Examples of the acid addition salt include inorganic acid salts such as hydrochlorides, hydrobromides, sulfates, hydroiodides, nitrates, and phosphates; and organic acid salts such as citrates, oxalates, phthalates, fumarates, maleates, succinates, malates, acetates, formates, propionates, benzoates, trifluoroacetates, methanesulfonates, benzenesulfonates, para-toluenesulfonates, and camphorsulfonates. Examples of the base addition salt include inorganic base salts such as sodium salts, potassium salts, calcium salts, magnesium salts, barium salts, and aluminum salts; and organic base salts such as trimethylamine, triethylamine, pyridine, picoline, 2,6-lutidine, ethanolamine, diethanolamine, triethanolamine, tromethamine [tris(hydroxymethyl)methylamine], tert-butylamine, cyclohexylamine, dicyclohexylamine, and N,N-dibenzylethylamine. An additional example is a salt with a basic amino acid or acidic amino acid (amino acid salt) such as arginine, lysine, ornithine, aspartic acid, or glutamic acid. The same also applies to a double-stranded antisense oligonucleotide and antisense oligonucleotide complex described later.

### <Structure of Single-Stranded Antisense Oligonucleotide>

[0145] The single-stranded antisense oligonucleotide according to the present embodiment is composed of a natural oligonucleotide and/or a non-natural oligonucleotide. It is preferable that the single-stranded antisense oligonucleotide be in the form of a single chain. In an aspect of the present embodiment, the single-stranded antisense oligonucleotide may hybridize with a second-strand oligonucleotide described later to take the form of a duplex (double-stranded antisense oligonucleotide). It is preferable that the nucleotide sequence of the second-strand oligonucleotide be a nucleotide sequence having a sequence identity of 90% or more and 100% or less with a nucleotide sequence complementary to the nucleotide sequence of the single-stranded antisense oligonucleotide.

### <Mechanism of Exon Skipping by Single-Stranded Antisense Oligonucleotide>

[0146] The single-stranded antisense oligonucleotide restores a reading frame of an abnormally spliced target RNA into the original reading frame to induce expression of the functional WRN protein through the following mechanism.

[0147] An exon is included in an mRNA only when both of the splice sites are recognized by a spliceosome complex, and hence splicing can be inhibited by targeting any of the splice sites with an antisense oligonucleotide to induce exon skipping. Exon skipping can be induced through a process in which a single-stranded antisense oligonucleotide targeting either one or both of the 5′ splice site and 3′ splice site of an exon or the inside of an exon binds to the exon. That is, an exon of interest can be skipped through the process in which the single-stranded antisense oligonucleotide binds to the target region of the target RNA to inhibit splicing of the exon, and translation into a functional protein is induced on the basis of the mRNA expressed.

[0148] The single-stranded antisense oligonucleotide, in the present embodiment, can be preferably used for skipping the 27th exon of a human WRN gene with high efficiency through the mechanism as described above (including the case of acting via regulating the maturation of an mRNA precursor for WRN). More specifically, the single-stranded antisense oligonucleotide binds to exon 27, which is the target region of the target RNA (mRNA precursor of WRN gene) (top in FIG. 3) to inhibit splicing of exon 27. Accordingly, a termination codon within exon 27 that has appeared as a result of a skipping mutation in exon 26, the mutation found in Werner syndrome patients, is skipped to generate a WRN mRNA in which exon 25 and exon 28 are linked together (corrected to the reading frame of the WRN gene of healthy individuals: in-frame) (middle in FIG. 3), and translation into the functional WRN protein having a nuclear localization signal contained in exon 34 occurs on the basis of the mRNA. Furthermore, according to the present embodiment, the effect of the single-stranded antisense oligonucleotide to regulate expression of a functional WRN gene can be exerted even in transdermal administration, intravenous administration, and intradermal administration, which are routes of administration commonly used in clinical applications. Here, “skipping the 27th exon of a human WRN gene with high efficiency” at least means skipping the 27th exon of a human WRN gene with high efficiency, and at least means the resulting restoration of expression of a functional WRN protein.

[0149] Examples of natural nucleotides whose sugar moiety is deoxyribose include deoxyadenosine monophosphate, deoxyguanosine monophosphate, thymidine monophosphate, deoxycytidine monophosphate, and deoxy-5-methylcytidine monophosphate. In other words, examples of natural nucleotides constituting the single-stranded antisense oligonucleotide include those having structural formulas corresponding to the signs a, g, t, c, and 5(x) shown later.

[0150] Examples of non-natural nucleotides whose sugar moiety is deoxyribose include 2-thio-thymidine monophosphate, 2-aminoadenosine monophosphate, and 7-deazaguanosine monophosphate.

[0151] The single-stranded antisense oligonucleotide of the present invention is 10 to 30 mer, preferably 15 to 25 mer, more preferably 18 to 22 mer, further preferably 16 to 20 mer, and particularly preferably 18 to 20 mer in nucleotide length. If the single-stranded antisense oligonucleotide of the present invention is 15 to 25 mer, 18 to 22 mer, 16 to 20 mer, or 18 to 20 mer in nucleotide length, the binding to an mRNA precursor for WRN is particularly strong, and high-efficient skipping of the 27th exon of a human WRN gene can be effectively controlled.

[0152] In the present embodiment, one nucleotide is bound to another via a phosphate group and/or modified phosphate group in the single-stranded antisense oligonucleotide, and it is preferable that one nucleotide be bound to another via a phosphodiester bond or a phosphorothioate bond in the single-stranded antisense oligonucleotide.

### <Double-Stranded Antisense Oligonucleotide>

[0153] The double-stranded antisense oligonucleotide according to the present embodiment is a double-stranded antisense oligonucleotide containing the single-stranded antisense oligonucleotide and a second-strand oligonucleotide hybridizing with the single-stranded antisense oligonucleotide, or a pharmaceutically acceptable salt thereof. It is preferable that the nucleotide sequence of the second-strand oligonucleotide be a nucleotide sequence having a sequence identity of 90% or more and 100% or less with a nucleotide sequence complementary to the nucleotide sequence of the single-stranded antisense oligonucleotide.

[0154] The double-stranded antisense oligonucleotide can dissociate in a solution to separate into the single-stranded antisense oligonucleotide and the second-strand oligonucleotide. The single-stranded antisense oligonucleotide separated can bind to the target RNA described above. The single-stranded antisense oligonucleotide may be regarded as the “first-strand oligonucleotide” in relation to the second-strand oligonucleotide. Of the oligonucleotides constituting the double-stranded antisense oligonucleotide, the first-strand oligonucleotide has an antisense strand to the target RNA described above; however, the double-stranded oligonucleotide consisting of the first-strand oligonucleotide and the second-strand oligonucleotide is referred to as the “double-stranded antisense oligonucleotide” for convenience.

### <<Method for Producing Single-Stranded Antisense Oligonucleotide>>

[0155] The single-stranded antisense oligonucleotide of the present invention can be produced through solid-phase synthesis by a phosphoramidite method. For example, a single-stranded oligonucleotide having a specific nucleotide sequence is first synthesized on a solid-phase carrier by using a commercially available automated nucleic acid synthesizer. Next, the single-stranded oligonucleotide synthesized is cut out of the solid-phase carrier by using a basic substance or the like, and deprotected to give a crude form of the single-stranded oligonucleotide. Thereafter, the resulting crude form of the single-stranded oligonucleotide is purified by using HPLC or the like. Production of the single-stranded antisense oligonucleotide of the present invention is not limited to the described production method, and the single-stranded antisense oligonucleotide of the present invention can be produced with appropriate modification of, for example, the nucleotide sequence or modification sites of the nucleic acid according to a method known to those skilled in the art. AmNA, GuNA, and scpBNA can be produced with methods described in WO 2011/052436 (PTL 1), WO 2014/046212 (PTL 2), and WO 2015/125783 (PTL 3), respectively. Morpholino oligonucleic acids (PMO) can be produced according to a method described in WO 1991/009033 (PTL 4), WO 2009/064471 (PTL 5), or NPL 8.

### <<Method for Producing Double-Stranded Antisense Oligonucleotide>>

[0156] The double-stranded antisense oligonucleotide of the present invention can be produced as follows: first, an oligonucleotide having a specific sequence identity with a nucleotide sequence complementary to the single-stranded antisense oligonucleotide (second-strand oligonucleotide) is produced by using the same production method as for the single-stranded antisense oligonucleotide; thereafter, the single-stranded antisense oligonucleotide and the second-strand oligonucleotide are allowed to hybridize with each other.

### <<Antisense Oligonucleotide Complex>>

[0157] The antisense oligonucleotide complex according to the present embodiment contains:
[0158] the oligonucleotide (preferably, the single-stranded antisense oligonucleotide) or a pharmaceutically acceptable salt thereof, or the double-stranded antisense oligonucleotide or a pharmaceutically acceptable salt thereof; and
[0159] an additive substance bound to the oligonucleotide or the second-strand oligonucleotide.

[0160] The additive substance is selected from the group consisting of polyethylene glycol, a peptide, an alkyl chain (e.g., saturated aliphatic hydrocarbon), a ligand compound, an antibody, a protein, and a sugar chain (e.g., carbohydrate, polysaccharide).

[0161] In an aspect of the present embodiment, the oligonucleotide complex is an oligonucleotide complex or a pharmaceutically acceptable salt thereof, the oligonucleotide complex containing:
[0162] the oligonucleotide or a pharmaceutically acceptable salt thereof, or the double-stranded antisense oligonucleotide or a pharmaceutically acceptable salt thereof; and
[0163] an additive substance bound to the oligonucleotide or the second-strand oligonucleotide directly or via a linker bond, wherein
[0164] the additive substance is selected from the group consisting of polyethylene glycol, a peptide, an alkyl chain, a ligand compound, an antibody, a protein, and a sugar chain, and
[0165] the linker bond is independently in each occurrence a phosphodiester bond, a phosphorothioate bond, a phosphorodithioate bond, a phosphoamidate bond, a boranophosphate bond, an alkylphosphonate bond, a phosphorodiamidate bond, a phosphorodiamidothioate bond, or a phosphorodiamidodithioate bond.

[0166] In an aspect of the present embodiment, the antisense oligonucleotide complex contains:
[0167] the oligonucleotide (preferably, the single-stranded antisense oligonucleotide) or a pharmaceutically acceptable salt thereof; and
[0168] an additive substance bound to the oligonucleotide, wherein the additive substance is selected from the group consisting of polyethylene glycol, a peptide, an alkyl chain, a ligand compound, an antibody, a protein, and a sugar chain.

[0169] In another aspect of the present embodiment, the antisense oligonucleotide complex contains:
[0170] the double-stranded antisense oligonucleotide or a pharmaceutically acceptable salt thereof; and
[0171] an additive substance bound to the single-stranded antisense oligonucleotide or the second-strand oligonucleotide, wherein the additive substance is selected from the group consisting of polyethylene glycol, a peptide, an alkyl chain (e.g., saturated aliphatic hydrocarbon), a ligand compound, an antibody, a protein, and a sugar chain (e.g., carbohydrate, polysaccharide).

[0172] In the present embodiment, the “additive substance” refers to a substance that is bound to the single-stranded antisense oligonucleotide or the second-strand oligonucleotide and used for imparting a specific effect. The additive substance may be bound to the 5′ end, the 3′ end, or each of the 5′ end and 3′ end of the single-stranded antisense oligonucleotide. The additive substance may be bound to the 5′ end, the 3′ end, or each of the 5′ end and 3′ end of the second-strand oligonucleotide. In an aspect of the present embodiment, it is preferable that the additive substance be bound to either one of the 5′ end and 3′ end of the single-stranded antisense oligonucleotide or the second-strand oligonucleotide. The additive substance may be directly bound to the single-stranded antisense oligonucleotide or the second-strand oligonucleotide via a covalent bond. The additive substance may be bound to the single-stranded antisense oligonucleotide or the second-strand oligonucleotide via a linker substance. Examples of the linker substance include an alkyl, polyethylene glycol, a peptide, a disulfide, a phosphate bond, and/or a linker composed of any combination of them. The linker substance may be regarded as a linker bond.

[0173] Examples of the peptide to be used as the additive substance include, but are not limited to, the followings: CPPs (Cell Penetrating Peptides), nuclear-localized peptides, TAT (Trans-Activator of Transcription protein), polyarginine, glucagon-like peptide 1 analog peptide, synthetic cyclic RGD peptide, and skin penetrating peptides.

[0174] Examples of the ligand compound to be used as the additive substance include, but are not limited to, the followings: N-acetylgalactosamine (GalNAc), saccharides (e.g., glucose, mannose), lipids (e.g., cholesterol), vitamins (e.g., folic acid, vitamin A, vitamin E), and amino acids.

[0175] Examples of the antibody to be used as the additive substance include, but are not limited to, the followings: an anti-insulin receptor antibody, an anti-transferrin receptor antibody, an anti-LDL receptor-associated protein antibody, an anti-CD22 antibody, an anti-CD30 antibody, and an anti-HER2 antibody.

[0176] Examples of the protein to be used as the additive substance include, but are not limited to, the following: albumin.

[0177] Examples of combinations of the additive substance and the linker substance in morpholino oligonucleic acids include, but are not limited to, those represented by the following structural formula:

[chemical structure]

### <<Skipping Agent for 27th Exon of Human WRN Gene>>

[0178] The skipping agent for the 27th exon of a human WRN gene according to the present embodiment contains the single-stranded antisense oligonucleotide of the present invention, the double-stranded antisense oligonucleotide, or the antisense oligonucleotide complex as an active ingredient.

[0179] The single-stranded antisense oligonucleotide of the present invention enables skipping of the 27th exon of a human WRN gene by binding to an mRNA precursor for WRN. Any administration method and formulation known in the art are available as an administration method and formulation for the skipping agent.

### <<Functional WRN Recovery Agent>>

[0180] The functional WRN recovery agent according to the present embodiment is a functional WRN recovery agent that possesses a nuclear localization signal by virtue of skipping of the 27th exon of a human WRN gene, the functional WRN recovery agent containing the oligonucleotide or a pharmaceutically acceptable salt thereof, the double-stranded antisense oligonucleotide or a pharmaceutically acceptable salt thereof, or the oligonucleotide complex or a pharmaceutically acceptable salt thereof as an active ingredient. The single-stranded antisense oligonucleotide of the present invention enables skipping of the 27th exon of a human WRN gene by binding to an mRNA precursor for WRN. In particular, if the human WRN gene has a skipping mutation in exon 26, the mutation found in Werner syndrome patients, a termination codon within exon 27 that has appeared in the human WRN gene is skipped to generate a WRN mRNA in which exon 25 and exon 28 are linked together, and translation into a functional WRN protein having a nuclear localization signal contained in exon 34 occurs on the basis of the mRNA.

### <<Pharmaceutical Composition Containing Single-Stranded Antisense Oligonucleotide or the Like as Active Ingredient>>

[0181] The pharmaceutical composition according to the present embodiment contains the single-stranded antisense oligonucleotide of the present invention or a pharmaceutically acceptable salt thereof, the double-stranded antisense oligonucleotide or a pharmaceutically acceptable salt thereof, or the antisense oligonucleotide complex or a pharmaceutically acceptable salt thereof as an active ingredient. Any administration method and formulation known in the art are available as an administration method and formulation for the pharmaceutical composition of the present embodiment. Hereinafter, the pharmaceutical composition is occasionally referred to as “the pharmaceutical composition of the antisense oligonucleotide or the like”.

[0182] The pharmaceutical composition is used for treating or preventing Werner syndrome. In other words, the pharmaceutical composition can be used for treatment or prevention expected to ameliorate symptoms of Werner syndrome by skipping the 27th exon of a human WRN gene with high efficiency.

### <<Therapeutic Agent and Prophylactic Agent for Werner Syndrome>

[0183] The therapeutic agent for Werner syndrome according to the present embodiment contains the single-stranded antisense oligonucleotide or a pharmaceutically acceptable salt thereof, the double-stranded antisense oligonucleotide or a pharmaceutically acceptable salt thereof, or the antisense oligonucleotide complex or a pharmaceutically acceptable salt thereof as an active ingredient. The prophylactic agent for Werner syndrome according to the present embodiment contains the single-stranded antisense oligonucleotide or a pharmaceutically acceptable salt thereof, the double-stranded antisense oligonucleotide or a pharmaceutically acceptable salt thereof, or the antisense oligonucleotide complex or a pharmaceutically acceptable salt thereof as an active ingredient.

### <Individuals>

[0184] An individual in the present invention refers to a mammal. Preferred are humans, monkeys, marmosets, dogs, pigs, rabbits, guinea pigs, rats, and mice. More preferred are humans.

[0185] In administering the single-stranded antisense oligonucleotide of the present invention or the pharmaceutical composition (including the therapeutic agent and prophylactic agent for Werner syndrome), the administration method and dosage form are not limited. That is, any administration method and formulation known in the art can be used as an administration method and formulation for the antisense oligonucleotide or the like of the present invention. Examples of the administration method include oral administration and parenteral administration. Examples of the parenteral administration include ophthalmic administration, intravaginal administration, intrarectal administration, intranasal administration, transdermal administration, intravenous injection, drip infusion, subcutaneous administration, intraperitoneal administration or intramuscular infusion, pulmonary administration by aspiration or inhalation, intrathecal administration, and intracerebroventricular administration.

[0186] As necessary, various pharmaceutical excipients such as diluents, binders, wetting agents, disintegrators, lubricants, diluting agents, corrigents, aromatic substances, solubilizers, suspending agents, emulsifying agents, stabilizers, preservatives, and isotonic agents can be mixed into the formulation of the antisense oligonucleotide or the like of the present invention.

[0187] In topically administering the pharmaceutical composition of the antisense oligonucleotide or the like of the present invention, formulations including transdermal patches, ointments, lotions, creams, gels, drops, suppositories, sprays, liquids, and powders are available.

[0188] In orally administering the pharmaceutical composition of the antisense oligonucleotide or the like of the present invention, formulations including powders, granules, suspensions or solutions with water or nonaqueous medium for dissolution, capsules, dry powders, and tablets are available.

[0189] In parenterally, intravenously, subcutaneously, or intradermally administering the pharmaceutical composition of the antisense oligonucleotide or the like of the present invention, formulations including sterile aqueous solutions are available.

[0190] The effective dose of the single-stranded antisense oligonucleotide of the present invention can be arbitrarily set, for example, according to the sex, age, and body weight of and symptoms in an individual to receive the dose. Additionally, the effective dose can be arbitrarily set, for example, according to the method, route, and frequency of administration. An example of the dose is 0.01 to 100 mg/kg. The dose is preferably 0.1 to 50 mg/kg, and further preferably 0.1 to 10 mg/kg.

<<Method for Skipping 27th Exon of Human WRN Gene with High Efficiency>>

[0191] The method for skipping the 27th exon of a human WRN gene in the present embodiment includes administering the single-stranded antisense oligonucleotide or a pharmaceutically acceptable salt thereof, the double-stranded antisense oligonucleotide or a pharmaceutically acceptable salt thereof, or the antisense oligonucleotide complex or a pharmaceutically acceptable salt thereof as an active ingredient to cells, tissue, or an individual expressing such a WRN gene.

[0192] In the present embodiment, administering the single-stranded antisense oligonucleotide or the like to cells, tissue, or an individual may be performed with an in vitro or in vivo method. For in vivo administration, any of the routes of administration mentioned above is used as a route of administration therefor.

[0193] Examples of the “cells expressing a WRN gene” in the present embodiment include fibroblasts, adipocytes, mesenchymal stem cells, keratinocytes, myocytes, vascular endothelial cells, and smooth muscle cells.

[0194] The method for treating or preventing Werner syndrome in the present embodiment includes administering the single-stranded antisense oligonucleotide or a pharmaceutically acceptable salt thereof, the double-stranded antisense oligonucleotide or a pharmaceutically acceptable salt thereof, or the antisense oligonucleotide complex or a pharmaceutically acceptable salt thereof as an active ingredient to an individual affected by Werner syndrome.

[0195] Thus, the antisense oligonucleotide according to the present embodiment has been described. The single-stranded antisense oligonucleotide having the configuration described above enables skipping of the 27th exon of a human WRN gene with high efficiency.

### <<Method for Evaluating Activity for Skipping of 27th Exon of Human WRN Gene>>

<Introduction of Antisense Oligonucleotide into Cells>

[0196] Observation of “cells expressing a WRN gene” becomes possible by treating them with the antisense oligonucleotide by means of introduction by, for example, lipofection, electroporation, or direct addition for 6 hours to a month. It is preferable that the treatment time be 48 hours to 7 days. The cells to be used can be any cells expressing a WRN gene, and are, for example, HEK293T cells or fibroblasts derived from a Werner syndrome patient (hereinafter, referred to as “Werner syndrome patient fibroblasts”). The cells treated with the antisense oligonucleotide may be collected immediately after the treatment, or continuously cultured with the antisense oligonucleotide removed.

### <Evaluation of 27th Exon Skipping for Human WRN Gene>

[0197] Reverse transcription reaction is performed for the total RNA extracted from the cells collected, and a region around exon 27 of a WRN gene of the resulting cDNA is amplified through PCR. The 27th exon skipping for the WRN gene can be confirmed by quantification of the amounts of polynucleotides or sequence analysis for the PCR amplification products. To calculate the skipping efficiency (%), the amounts of the polynucleotides of PCR products with exon 27 skipped, “A”, and the amounts of the polynucleotides of PCR products without exon 27 skipped, “B”, are quantified, and the measurements of “A” and “B” are applied to the following calculation formula.

Skipping efficiency (%)=100×A/(A+B)

[0198] The present invention is not limited to the embodiment described above. For example, the following modes of implementation are included as the single-stranded antisense oligonucleotide.

[0199] A mode of the single-stranded antisense oligonucleotide of the present invention is an oligonucleotide that expresses a functional human WRN protein against a skip mutation in the 26th or 28th exon of a human WRN gene, or a pharmaceutically acceptable salt thereof, wherein
[0200] one nucleotide is bound to another via a phosphate group and/or modified phosphate group in the oligonucleotide,
[0201] the oligonucleotide contains a modified nucleic acid having at least one modified sugar,
[0202] the oligonucleotide is 10 to 30 mer in nucleotide length, and
[0203] the nucleotide sequence of the oligonucleotide is:
[0204] a nucleotide sequence having a sequence identity of 90% or more and 100% or less with a nucleotide sequence complementary to at least one target region having the same nucleotide length as the oligonucleotide in a nucleotide sequence set forth in SEQ ID NO: 1;
[0205] a nucleotide sequence complementary to a nucleotide sequence formed by deleting, substituting, inserting, or adding one or several nucleotides in the target region; or
[0206] a nucleotide sequence hybridizable with an oligonucleotide having the target region under stringent conditions.

[0207] In another mode of the single-stranded antisense oligonucleotide of the present invention, the nucleotide sequence of the single-stranded antisense oligonucleotide is:
[0208] a nucleotide sequence having a sequence identity of 95% or more and 100% or less with a nucleotide sequence complementary to at least one target region having the same nucleotide length as the single-stranded antisense oligonucleotide in a nucleotide sequence set forth in SEQ ID NO: 1, SEQ ID NO: 2, SEQ ID NO: 3, SEQ ID NO: 4, SEQ ID NO: 5, or SEQ ID NO: 6.

[0209] In another mode of the single-stranded antisense oligonucleotide of the present invention, the nucleotide sequence of the single-stranded antisense oligonucleotide is a nucleotide sequence complementary to at least one target region having the same nucleotide length as the single-stranded antisense oligonucleotide in a nucleotide sequence set forth in SEQ ID NO: 1, SEQ ID NO: 2, SEQ ID NO: 3, SEQ ID NO: 4, SEQ ID NO: 5, or SEQ ID NO: 6.

[0210] In another mode of the single-stranded antisense oligonucleotide of the present invention, a sugar constituting the oligonucleotide is D-ribofuranose, and modification of a sugar is sugar modification on a hydroxy group at position 2′ of D-ribofuranose.

[0211] The oligonucleotide is 15 to 25 mer in nucleotide length.

[0212] In another mode of the single-stranded antisense oligonucleotide of the present invention, modification of a sugar constituting the oligonucleotide is made to form a group represented by the following formula (A1):

[chemical structure]

wherein Bx is a nucleobase, being independently in each occurrence a group formed from adenine, guanine, cytosine, 5-methylcytosine, thymine, or uracil; X is a phosphate bond, being independently in each occurrence a phosphodiester bond, a phosphorothioate bond, a phosphorodithioate bond, a phosphoamidate bond, a boranophosphate bond, or an alkylphosphonate bond; Y is independently in each occurrence a hydrogen atom, a hydroxy group, a fluorine atom, an optionally substituted alkoxy group having one to six carbon atoms, or an optionally substituted amino group; and Z is independently in each occurrence a hydrogen atom, or an alkyl group having one to five carbon atoms and optionally having a carbon-oxygen double bond or a cyclic structure, or a certain carbon atom in the alkyl group and Y are taken together to form a ring. Examples of the “carbon-oxygen double bond” possessed by the alkyl group having one to five carbon atoms include a carbonyl group. Examples of the “cyclic structure” possessed by the alkyl group having one to five carbon atoms include a cyclopropane structure.

[0213] In another mode of the single-stranded antisense oligonucleotide of the present invention, at least one internucleotide bond in the oligonucleotide is a phosphorothioate bond.

[0214] In another mode of the single-stranded antisense oligonucleotide of the present invention, at least one internucleotide bond in the oligonucleotide is a phosphodiester bond.

[0215] In another mode of the single-stranded antisense oligonucleotide of the present invention, the nucleotide sequence of the oligonucleotide is:
[0216] a nucleotide sequence having a sequence identity of 90% or more and 100% or less with a nucleotide sequence complementary to a target region composed of continuous 15 to 25 mer starting from a nucleotide at any of positions 1 to 12, 14 to 21, 24, 25, 29 to 31, 34, 36, 41, 46, 51, and 62 counted from a 5′ end in a nucleotide sequence set forth in SEQ ID NO: 1;
[0217] a nucleotide sequence complementary to a nucleotide sequence formed by deleting, substituting, inserting, or adding one or several nucleotides in the target region; or
[0218] a nucleotide sequence hybridizable with an oligonucleotide having the target region under stringent conditions.

[0219] In another mode of the single-stranded antisense oligonucleotide of the present invention, the nucleotide sequence of the oligonucleotide is:
[0220] a nucleotide sequence having a sequence identity of 90% or more and 100% or less with a nucleotide sequence complementary to a target region composed of continuous 15 to 25 mer starting from a nucleotide at any of positions 1 to 40, 46, 51, 56, and 62 to 63 counted from a 5′ end in a nucleotide sequence set forth in SEQ ID NO: 1 or a target region composed of continuous 15 to 25 mer starting from a nucleotide at any of positions 108873, 108878 to 108917, 108923, 108928, 108933, and 108939 to 108940 counted from a 5′ end in a nucleotide sequence set forth in SEQ ID NO: 2;
[0221] a nucleotide sequence complementary to a nucleotide sequence formed by deleting, substituting, inserting, or adding one or several nucleotides in the target region; or
[0222] a nucleotide sequence hybridizable with an oligonucleotide having the target region under stringent conditions.

[0223] In another mode of the single-stranded antisense oligonucleotide of the present invention, the nucleotide sequence of the oligonucleotide is a nucleotide sequence having a sequence identity of 90% or more and 100% or less with a nucleotide sequence complementary to a target region composed of continuous 15 to 25 mer starting from a nucleotide at any of positions 1, 3 to 12, 14 to 19, 21, 25, 29, 30, 31, 34, 46, and 51 counted from a 5′ end in a nucleotide sequence set forth in SEQ ID NO: 1.

[0224] In another mode of the single-stranded antisense oligonucleotide of the present invention, the nucleotide sequence of the oligonucleotide is a nucleotide sequence having a sequence identity of 90% or more and 100% or less with a nucleotide sequence complementary to a target region composed of continuous 15 to 25 mer starting from a nucleotide at any of positions 1 to 32, 34 to 40, 46, 51, and 62 to 63 counted from a 5′ end in a nucleotide sequence set forth in SEQ ID NO: 1 or a target region composed of continuous 15 to 25 mer starting from a nucleotide at any of positions 108878 to 108909, 108911 to 108917, 108923, 108928, and 108939 to 108940 counted from a 5′ end in a nucleotide sequence set forth in SEQ ID NO: 2.

[0225] In another mode of the single-stranded antisense oligonucleotide of the present invention, the nucleotide sequence of the oligonucleotide is a nucleotide sequence having a sequence identity of 90% or more and 100% or less with a nucleotide sequence complementary to a target region composed of continuous 15 to 25 mer starting from a nucleotide at any of positions 1, 3, 6 to 12, 14 to 19, 21, 25, 29, 30, 31, 34, 46, and 51 counted from a 5′ end in a nucleotide sequence set forth in SEQ ID NO: 1.

[0226] In another mode of the single-stranded antisense oligonucleotide of the present invention, the nucleotide sequence of the oligonucleotide is a nucleotide sequence having a sequence identity of 90% or more and 100% or less with a nucleotide sequence complementary to a target region composed of continuous 15 to 25 mer starting from a nucleotide at any of positions 1, 3, 5 to 12, 14 to 19, 21, 25, 29, 30, 31, 34, 46, and 51 counted from a 5′ end in a nucleotide sequence set forth in SEQ ID NO: 1 or a target region composed of continuous 15 to 25 mer starting from a nucleotide at any of positions 108878, 108880, 108882 to 108889, 108891 to 108896, 108898, 108902, 108906 to 108908, 108911, 108923, and 108928 counted from a 5′ end in a nucleotide sequence set forth in SEQ ID NO: 2.

[0227] In another mode of the single-stranded antisense oligonucleotide of the present invention, modification of a sugar constituting the oligonucleotide is made to form a group represented by the following formula (A2) or formula (A3):

[chemical structure]

wherein Bx is a nucleobase, being independently in each occurrence a group formed from adenine, guanine, cytosine, 5-methylcytosine, thymine, or uracil; X is a phosphate bond, being independently in each occurrence a phosphodiester bond, a phosphorothioate bond, a phosphorodithioate bond, a phosphoamidate bond, a boranophosphate bond, or an alkylphosphonate bond; R⁴ is independently in each occurrence a hydrogen atom or an optionally substituted alkyl group having one to six carbon atoms; Y′ is an oxygen atom or an optionally substituted nitrogen atom; R⁵ and R⁶ are each independently in each occurrence a hydrogen atom or an optionally substituted alkyl group having one to six carbon atoms, or R⁵ and R⁶ are taken together to form a carbonyl group or a ring; and n is 0 to 1.

[0228] In another mode of the single-stranded antisense oligonucleotide of the present invention, the nucleotide sequence of the oligonucleotide is one nucleotide sequence selected from the group consisting of nucleotide sequences set forth in SEQ ID NOs: 9, 11, 14 to 22, 24 to 29, 31, 35, 39 to 41, 44, 52, and 53.

[0229] In another mode of the single-stranded antisense oligonucleotide of the present invention, the nucleotide sequence of the oligonucleotide is one nucleotide sequence selected from the group consisting of nucleotide sequences set forth in SEQ ID NOs: 9 to 14, 16 to 26, 28 to 39, 41 to 42, 44 to 50, 52, 55 to 56, 69, 73, 80 to 105, 107 to 108, 110, 112, 114, 116, 118 to 131, 133, and 135.

[0230] In another mode of the single-stranded antisense oligonucleotide of the present invention, the nucleotide sequence of the oligonucleotide is a single-stranded antisense oligonucleotide.

### EXAMPLES

[0231] Hereinafter, Examples according to the present invention will be described, but the present invention is not limited thereto.

### <<Preparation of Single-Stranded Antisense Oligonucleotides for WRN Gene>>

[0232] Single-stranded antisense oligonucleotides for a WRN gene were prepared in the following procedure.

[0233] Single-stranded antisense oligonucleotides containing any of 2′-OMe (O-methyl), 2′-MOE (O-methoxyethyl), AmNA, scpBNA, and GuNA were synthesized by using an automated nucleic acid synthesizer (model nS-8, manufactured by GeneDesign, Inc.) at a scale of 0.2 μmol. Chain length elongation was performed in accordance with a standard phosphoramidite protocol. At that time, CPG resin was used as a solid-phase carrier. In sulfidation for phosphorothioated skeleton (PS) formation, DDTT (((dimethylamino-methylidene)amino)-3H-1,2,4-dithiazaoline-3-thione) or the like was used. Antisense oligonucleotides containing any of AmNA and scpBNA were obtained as ones each of which had the hydroxy group at position 5′ of an end not protected with a DMTr (4,4′-dimethoxytrityl) group and was supported at position 3′ by the solid phase. Each single-stranded antisense oligonucleotide was cut out of the solid-phase carrier through subsequent alkali treatment, and collected in a state of solution. Thereafter, the solvent was distilled off from the collected solution to give a crude product. The crude products obtained were purified by reversed-phase HPLC to give purified single-stranded antisense oligonucleotides. The purities and structures of single-stranded antisense oligonucleotides obtained were checked by LC-MS (manufactured by Waters Corporation). Morpholino oligonucleic acids containing morpholino nucleic acid were synthesized according to WO 2009/064471 (PTL 5) or J. Am. Chem. Soc (2016) 138:15663-15672 (NPL 8).

[0234] The single-stranded antisense oligonucleotides produced with the method described above are listed in Table 2-1 to Table 2-7 in the following.

TABLE 2-1

| | | | Molecular | |
|---|---|---|---|---|
| | Sequence | | weight | SEQ |
| Example | name | Sequence (5′ −> 3′) | (found) | ID NO |
| 1 | (-)10-20-A | A(M)^G(M)^U(M)^U(M)^U(M)^U(M)^C(M)^G(M)^A(M)^A(M)^C | 6951.82 | 7 |
| | | (M)^U(M)^A(M)^A(M)^A(M)^A(M)^A(M)^A(M)^U(M)^A(M) | | |
| 2 | (-)5-20-A | G(M)^A(M)^U(M)^A(M)^C(M)^A(M)^G(M)^U(M)^U(M)^U(M)^U | 6942.94 | 8 |
| | | (M)^C(M)^G(M)^A(M)^A(M)^C(M)^U(M)^A(M)^A(M)^A(M) | | |
| 3 | 1-20-A | C(M)^C(M)^G(M)^A(M)^A(M)^G(M)^A(M)^U(M)^A(M)^C(M)^A | 6958.53 | 9 |
| | | (M)^G(M)^U(M)^U(M)^U(M)^U(M)^C(M)^G(M)^A(M)^A(M) | | |
| 4 | 2-20-A | C(M)^C(M)^C(M)^G(M)^A(M)^A(M)^G(M)^A(M)^U(M)^A(M)^C | 6935.82 | 10 |
| | | (M)^A(M)^G(M)^U(M)^U(M)^U(M)^U(M)^C(M)^G(M)^A(M) | | |
| 5 | 3-20-A | G(M)^C(M)^C(M)^C(M)^G(M)^A(M)^A(M)^G(M)^A(M)^U(M)^A | 6952.07 | 11 |
| | | (M)^C(M)^A(M)^G(M)^U(M)^U(M)^U(M)^U(M)^C(M)^G(M) | | |
| 6 | 4-20-A | U(M)^G(M)^C(M)^C(M)^C(M)^G(M)^A(M)^A(M)^G(M)^A(M)^U | 6910.14 | 12 |
| | | (M)^A(M)^C(M)^A(M)^G(M)^U(M)^U(M)^U(M)^U(M)^C(M) | | |
| 7 | 5-20-A | G(M)^U(M)^G(M)^C(M)^C(M)^C(M)^G(M)^A(M)^A(M)^G(M)^A | 6951.16 | 13 |
| | | (M)^U(M)^A(M)^C(M)^A(M)^G(M)^U(M)^U(M)^U(M)^U(M) | | |
| 8 | 6-20-A | G(M)^G(M)^U(M)^G(M)^C(M)^C(M)^C(M)^G(M)^A(M)^A(M)^G | 6988.32 | 14 |
| | | (M)^A(M)^U(M)^A(M)^C(M)^A(M)^G(M)^U(M)^U(M)^U(M) | | |
| 9 | 7-20-A | U(M)^G(M)^G(M)^U(M)^G(M)^C(M)^C(M)^C(M)^G(M)^A(M)^A | 6992.24 | 15 |
| | | (M)^G(M)^A(M)^U(M)^A(M)^C(M)^A(M)^G(M)^U(M)^U(M) | | |
| 10 | 8-20-A | U(M)^U(M)^G(M)^G(M)^U(M)^G(M)^C(M)^C(M)^C(M)^G(M)^A | 6990.45 | 16 |
| | | (M)^A(M)^G(M)^A(M)^U(M)^A(M)^C(M)^A(M)^G(M)^U(M) | | |
| 11 | 8-20-B | T(Y)^U(M)^G(M)^G(Y)^U(M)^G(Y)^C(M)^C(M)^5(Y)^G(M)^A | 7208.20 | 17 |
| | | (M)^A(Y)^G(M)^A(M)^T(Y)^A(M)^C(M)^A(Y)^G(M)^U(M) | | |
| 12 | 8-20-C | T(Y)-T(Y)^G(M)^G(M)^T(Y)-G(Y)^C(M)^C(M)^5(Y)-G(Y)^A | 7231.05 | 18 |
| | | (M)^A(M)^G(Y)-A(Y)^U(M)^A(M)^5(Y)-A(Y)^G(M)^U(M) | | |
| 13 | 9-20-A | U(M)^U(M)^U(M)^G(M)^G(M)^U(M)^G(M)^C(M)^C(M)^C(M)^G | 6992.05 | 19 |
| | | (M)^A(M)^A(M)^G(M)^A(M)^U(M)^A(M)^C(M)^A(M)^G(M) | | |
| 14 | 10-20-A | C(M)^U(M)^U(M)^U(M)^G(M)^G(M)^U(M)^G(M)^C(M)^C(M)^C | 6953.70 | 20 |
| | | (M)^G(M)^A(M)^A(M)^G(M)^A(M)^U(M)^A(M)^C(M)^A(M) | | |
| 15 | 11-20-A | U(M)^C(M)^U(M)^U(M)^U(M)^G(M)^G(M)^U(M)^G(M)^C(M)^C | 6928.27 | 21 |
| | | (M)^C(M)^G(M)^A(M)^A(M)^G(M)^A(M)^U(M)^A(M)^C(M) | | |
| 16 | 12-20-A | C(M)^U(M)^C(M)^U(M)^U(M)^U(M)^G(M)^G(M)^U(M)^G(M)^C | 6927.48 | 22 |
| | | (M)^C(M)^C(M)^G(M)^A(M)^A(M)^G(M)^A(M)^U(M)^A(M) | | |
| 17 | 13-20-A | G(M)^C(M)^U(M)^C(M)^U(M)^U(M)^U(M)^G(M)^G(M)^U(M)^G | 6945.10 | 23 |
| | | (M)^C(M)^C(M)^C(M)^G(M)^A(M)^A(M)^G(M)^A(M)^U(M) | | |
| 18 | 14-20-A | U(M)^G(M)^C(M)^U(M)^C(M)^U(M)^U(M)^U(M)^G(M)^G(M)^U | 6943.98 | 24 |
| | | (M)^G(M)^C(M)^C(M)^C(M)^G(M)^A(M)^A(M)^G(M)^A(M) | | |
| 19 | 15-20-A | A(M)^U(M)^G(M)^C(M)^U(M)^C(M)^U(M)^U(M)^U(M)^G(M)^G | 6944.03 | 25 |
| | | (M)^U(M)^G(M)^C(M)^C(M)^C(M)^G(M)^A(M)^A(M)^G(M) | | |
| 20 | 16-20-A | A(M)^A(M)^U(M)^G(M)^C(M)^U(M)^C(M)^U(M)^U(M)^U(M)^G | 6927.74 | 26 |
| | | (M)^G(M)^U(M)^G(M)^C(M)^C(M)^C(M)^G(M)^A(M)^A(M) | | |

| | | | Molecular | |
|---|---|---|---|---|
| | Sequence | | weight | SEQ |
| Example | name | Sequence (5′ −> 3′) | (found) | ID NO |
| 21 | 17-20-A | C(M)^A(M)^A(M)^U(M)^G(M)^C(M)^U(M)^C(M)^U(M)^U(M)^U | 6902.92 | 27 |
| | | (M)^G(M)^G(M)^U(M)^G(M)^C(M)^C(M)^C(M)^G(M)^A(M) | | |
| 22 | 18-20-A | A(M)^C(M)^A(M)^A(M)^U(M)^G(M)^C(M)^U(M)^C(M)^U(M)^U | 6903.00 | 28 |
| | | (M)^U(M)^G(M)^G(M)^U(M)^G(M)^C(M)^C(M)^C(M)^G(M) | | |
| 23 | 19-20-A | A(M)^A(M)^C(M)^A(M)^A(M)^U(M)^G(M)^C(M)^U(M)^C(M)^U | 6889.93 | 29 |
| | | (M)^U(M)^U(M)~G(M)^G(M)^U(M)^G(M)^C(M)^C(M)^C(M) | | |
| 24 | 20-20-A | U(M)^A(M)^A(M)^C(M)^A(M)^A(M)^U(M)^G(M)^C(M)^U(M)^C | 6890.72 | 30 |
| | | (M)^U(M)^U(M)^U(M)^G(M)^G(M)^U(M)^G(M)^C(M)^C(M) | | |
| 25 | 21-20-A | A(M)^U(M)^A(M)^A(M)^C(M)^A(M)^A(M)^U(M)^G(M)^C(M)^U | 6914.48 | 31 |
| | | (M)^C(M)^U(M)^U(M)^U(M)^G(M)^G(M)^U(M)^G(M)^C(M) | | |
| 26 | 22-20-A | U(M)^A(M)^U(M)^A(M)^A(M)^C(M)^A(M)^A(M)^U(M)^G(M)^C | 6918.16 | 32 |
| | | (M)^U(M)^C(M)^U(M)^U(M)^U(M)^G(M)^G(M)^U(M)^G(M) | | |
| 27 | 23-20-A | U(M)^U(M)^A(M)^U(M)^A(M)^A(M)^C(M)^A(M)^A(M)^U(M)^G | 6877.29 | 33 |
| | | (M)^C(M)^U(M)^C(M)^U(M)^U(M)^U(M)^G(M)^G(M)^U(M) | | |
| 28 | 24-20-A | A(M)^U(M)^U(M)^A(M)^U(M)^A(M)^A(M)^C(M)^A(M)^A(M)^U | 6902.98 | 34 |
| | | (M)^G(M)^C(M)^U(M)^C(M)^U(M)^U(M)^U(M)^G(M)^G(M) | | |
| 29 | 25-20-A | G(M)^A(M)^U(M)^U(M)^A(M)^U(M)^A(M)^A(M)^C(M)^A(M)^A | 6899.26 | 35 |
| | | (M)^U(M)^G(M)^C(M)^U(M)^C(M)^U(M)^U(M)^U(M)^G(M) | | |
| 30 | 26-20-A | U(M)^G(M)^A(M)^U(M)^U(M)^A(M)^U(M)^A(M)^A(M)^C(M)^A | 6861.06 | 36 |
| | | (M)^A(M)^U(M)^G(M)^C(M)^U(M)^C(M)^U(M)^U(M)^U(M) | | |
| 31 | 27-20-A | U(M)^U(M)^G(M)^A(M)^U(M)^U(M)^A(M)^U(M)^A(M)^A(M)^C | 6863.93 | 37 |
| | | (M)^A(M)^A(M)^U(M)^G(M)^C(M)^U(M)^C(M)^U(M)^U(M) | | |
| 32 | 28-20-A | C(M)^U(M)^U(M)^G(M)^A(M)^U(M)^U(M)^A(M)^U(M)^A(M)^A | 6861.32 | 38 |
| | | (M)^C(M)^A(M)^A(M)^U(M)^G(M)^C(M)^U(M)^C(M)^U(M) | | |
| 33 | 29-20-A | A(M)^C(M)^U(M)^U(M)^G(M)^A(M)^U(M)^U(M)^A(M)^U(M)^A | 6882.53 | 39 |
| | | (M)^A(M)^C(M)^A(M)^A(M)^U(M)^G(M)^C(M)^U(M)^C(M) | | |
| 34 | 30-20-A | U(M)^A(M)^C(M)^U(M)^U(M)^G(M)^A(M)^U(M)^U(M)^A(M)^U | 6884.23 | 40 |
| | | (M)^A(M)^A(M)^C(M)^A(M)^A(M)^U(M)^G(M)^C(M)^U(M) | | |
| 35 | 31-20-A | G(M)^U(M)^A(M)^C(M)^U(M)^U(M)^G(M)^A(M)^U(M)^U(M)^A | 6923.75 | 41 |
| | | (M)^U(M)^A(M)^A(M)^C(M)^A(M)^A(M)^U(M)^G(M)^C(M) | | |
| 36 | 32-20-A | G(M)^G(M)^U(M)^A(M)^C(M)^U(M)^U(M)^G(M)^A(M)^U(M)^U | 6963.70 | 42 |
| | | (M)^A(M)^U(M)^A(M)^A(M)^C(M)^A(M)^A(M)^U(M)^G(M) | | |
| 37 | 33-20-A | U(M)^G(M)^G(M)^U(M)^A(M)^C(M)^U(M)^U(M)^G(M)^A(M)^U | 6924.62 | 43 |
| | | (M)^U(M)^A(M)^U(M)^A(M)^A(M)^C(M)^A(M)^A(M)^U(M) | | |
| 38 | 34-20-A | C(M)^U(M)^G(M)^G(M)^U(M)^A(M)^C(M)^U(M)^U(M)^G(M)^A | 6923.60 | 44 |
| | | (M)^U(M)^U(M)^A(M)^U(M)^A(M)^A(M)^C(M)^A(M)^A(M) | | |
| 39 | 35-20-A | A(M)^C(M)^U(M)^G(M)^G(M)^U(M)^A(M)^C(M)^U(M)^U(M)^G | 6924.83 | 45 |
| | | (M)^A(M)^U(M)^U(M)^A(M)^U(M)^A(M)^A(M)^C(M)^A(M) | | |
| 40 | 36-20-A | A(M)^A(M)^C(M)^U(M)^G(M)^G(M)^U(M)^A(M)^C(M)^U(M)^U | 6921.14 | 46 |
| | | (M)^G(M)^A(M)^U(M)^U(M)^A(M)^U(M)^A(M)^A(M)^C(M) | | |

TABLE 2-3

| | | | Molecular | |
|---|---|---|---|---|
| | Sequence | | weight | SEQ |
| Example | name | Sequence (5′ −> 3′) | (found) | ID NO |
| 41 | 37-20-A | C(M)^A(M)^A(M)^C(M)^U(M)^G(M)^G(M)^U(M)^A(M)^C(M)^U | 6923.22 | 47 |
| | | (M)^U(M)^G(M)^A(M)^U(M)^U(M)^A(M)^U(M)^A(M)^A(M) | | |
| 42 | 38-20-A | U(M)^C(M)^A(M)^A(M)^C(M)^U(M)^G(M)^G(M)^U(M)^A(M)^C | 6900.02 | 48 |
| | | (M)^U(M)^U(M)^G(M)^A(M)^U(M)^U(M)^A(M)^U(M)^A(M) | | |
| 43 | 39-20-A | U(M)^U(M)^C(M)^A(M)^A(M)^C(M)^U(M)^G(M)^G(M)^U(M)^A | 6877.81 | 49 |
| | | (M)^C(M)^U(M)^U(M)^G(M)^A(M)^U(M)^U(M)^A(M)^U(M) | | |
| 44 | 40-20-A | A(M)^U(M)^U(M)^C(M)^A(M)^A(M)^C(M)^U(M)^G(M)^G(M)^U | 6899.32 | 50 |
| | | (M)^A(M)^C(M)^U(M)^U(M)^G(M)^A(M)^U(M)^U(M)^A(M) | | |
| 45 | 41-20-A | A(M)^A(M)^U(M)^U(M)^C(M)^A(M)^A(M)^C(M)^U(M)^G(M)^G | 6895.25 | 51 |
| | | (M)^U(M)^A(M)^C(M)^U(M)^U(M)^G(M)^A(M)^U(M)^U(M) | | |
| 46 | 46-20-A | U(M)^A(M)^C(M)^U(M)^U(M)^A(M)^A(M)^U(M)^U(M)^C(M)^A | 6857.81 | 52 |
| | | (M)^A(M)^C(M)^U(M)^G(M)^G(M)^U(M)^A(M)^C(M)^U(M) | | |
| 47 | 51-20-A | C(M)^U(M)^C(M)^U(M)^G(M)^U(M)^A(M)^C(M)^U(M)^U(M)^A | 6834.64 | 53 |
| | | (M)^A(M)^U(M)^U(M)^C(M)^A(M)^A(M)^C(M)^U(M)^G(M) | | |
| 48 | 56-20-A | U(M)^U(M)^C(M)^U(M)^U(M)^C(M)^U(M)^C(M)^U(M)^G(M)^U | 6751.36 | 54 |
| | | (M)^A(M)^C(M)^U(M)^U(M)^A(M)^A(M)^U(M)^U(M)^C(M) | | |
| 49 | 62-20-A | C(M)^A(M)^A(M)^A(M)^C(M)^C(M)^U(M)^U(M)^C(M)^U(M)^U | 6769.19 | 55 |
| | | (M)^C(M)^U(M)^C(M)^U(M)^G(M)^U(M)^A(M)^C(M)^U(M) | | |
| 50 | 63-20-A | A(M)^C(M)^A(M)^A(M)^A(M)^C(M)^C(M)^U(M)^U(M)^C(M)^U | 6793.63 | 56 |
| | | (M)^U(M)^C(M)^U(M)^C(M)^U(M)^G(M)^U(M)^A(M)^C(M) | | |
| 51 | 66-20-A | A(M)^A(M)^A(M)^A(M)^C(M)^A(M)^A(M)^A(M)^C(M)^C(M)^U | 6840.57 | 57 |
| | | (M)^U(M)^C(M)^U(M)^U(M)^C(M)^U(M)^C(M)^U(M)^G(M) | | |
| 52 | 70-20-A | C(M)^U(M)^U(M)^U(M)^A(M)^A(M)^A(M)^A(M)^C(M)^A(M)^A | 6800.68 | 58 |
| | | (M)^A(M)^C(M)^C(M)^U(M)^U(M)^C(M)^U(M)^U(M)^C(M) | | |
| 53 | 1-15-A | G(M)^A(M)^U(M)^A(M)^C(M)^A(M)^G(M)^U(M)^U(M)^U(M)^U | 5194.90 | 59 |
| | | (M)^C(M)^G(M)^A(M)^A(M) | | |
| 54 | 2-15-A | A(M)^G(M)^A(M)^U(M)^A(M)^C(M)^A(M)^G(M)^U(M)^U(M)^U | 5195.06 | 60 |
| | | (M)^U(M)^C(M)^G(M)^A(M) | | |
| 55 | 3-15-A | A(M)^A(M)^G(M)^A(M)^U(M)^A(M)^C(M)^A(M)^G(M)^U(M)^U | 5194.48 | 61 |
| | | (M)^U(M)^U(M)^C(M)^G(M) | | |
| 56 | 4-15-A | G(M)^A(M)^A(M)^G(M)^A(M)^U(M)^A(M)^C(M)^A(M)^G(M)^U | 5194.45 | 62 |
| | | (M)^U(M)^U(M)^U(M)^C(M) | | |
| 57 | 5-15-A | C(M)^G(M)^A(M)^A(M)^G(M)^A(M)^U(M)^A(M)^C(M)^A(M)^G | 5194.46 | 63 |
| | | (M)^U(M)^U(M)^U(M)^U(M) | | |
| 58 | 6-15-A | C(M)^C(M)^G(M)^A(M)^A(M)^G(M)^A(M)^U(M)^A(M)^C(M)^A | 5196.79 | 64 |
| | | (M)^G(M)^U(M)^U(M)^U(M) | | |
| 59 | 7-15-A | C(M)^C(M)^C(M)^G(M)^A(M)^A(M)^G(M)^A(M)^U(M)^A(M)^C | 5195.64 | 65 |
| | | (M)^A(M)^G(M)^U(M)^U(M) | | |
| 60 | 8-15-A | G(M)^C(M)^C(M)^C(M)^G(M)^A(M)^A(M)^G(M)^A(M)^U(M)^A | 5234.46 | 66 |
| | | (M)^C(M)^A(M)^G(M)^U(M) | | |

TABLE 2-4

| | | | Molecular | |
|---|---|---|---|---|
| | Sequence | | weight | SEQ |
| Example | name | Sequence (5′ −> 3′) | (found) | ID NO |
| 61 | 9-15-A | U(M)^G(M)^C(M)^C(M)^C(M)^G(M)^A(M)^A(M)^G(M)^A(M)^U | 5233.92 | 67 |
| | | (M)^A(M)^C(M)^A(M)^G(M) | | |
| 62 | 10-15-A | G(M)^U(M)^G(M)^C(M)^C(M)^C(M)^G(M)^A(M)^A(M)^G(M)^A | 5234.25 | 68 |
| | | (M)^U(M)^A(M)^C(M)^A(M) | | |
| 63 | 11-15-A | G(M)^G(M)^U(M)^G(M)^C(M)^C(M)^C(M)^G(M)^A(M)^A(M)^G | 5250.48 | 69 |
| | | (M)^A(M)^U(M)^A(M)^C(M) | | |
| 64 | 12-15-A | U(M)^G(M)^G(M)^U(M)^G(M)^C(M)^C(M)^C(M)^G(M)^A(M)^A | 5251.03 | 70 |
| | | (M)^G(M)^A(M)^U(M)^A(M) | | |
| 65 | 13-15-A | U(M)^U(M)^G(M)^G(M)^U(M)^G(M)^C(M)^C(M)^C(M)^G(M)^A | 5227.01 | 71 |
| | | (M)^A(M)^G(M)^A(M)^U(M) | | |
| 66 | 14-15-A | U(M)^U(M)^U(M)^G(M)^G(M)^U(M)^G(M)^C(M)^C(M)^C(M)^G | 5227.14 | 72 |
| | | (M)^A(M)^A(M)^G(M)^A(M) | | |
| 67 | 15-15-A | C(M)^U(M)^U(M)^U(M)^G(M)^G(M)^U(M)^G(M)^C(M)^C(M)^C | 5201.97 | 73 |
| | | (M)^G(M)^A(M)^A(M)^G(M) | | |
| 68 | 16-15-A | U(M)^C(M)^U(M)^U(M)^U(M)^G(M)^G(M)^U(M)^G(M)^C(M)^C | 5163.96 | 74 |
| | | (M)^C(M)^G(M)^A(M)^A(M) | | |
| 69 | 17-15-A | C(M)^U(M)^C(M)^U(M)^U(M)^U(M)^G(M)^G(M)^U(M)^G(M)^C | 5139.28 | 75 |
| | | (M)^C(M)^C(M)^G(M)^A(M) | | |
| 70 | 18-15-A | G(M)^C(M)^U(M)^C(M)^U(M)^U(M)^U(M)^G(M)^G(M)^U(M)^G | 5155.50 | 76 |
| | | (M)^C(M)^C(M)^C(M)^G(M) | | |
| 71 | 19-15-A | U(M)^G(M)^C(M)^U(M)^C(M)^U(M)^U(M)^U(M)^G(M)^G(M)^U | 5118.85 | 77 |
| | | (M)^G(M)^C(M)^C(M)^C(M) | | |
| 72 | 20-15-A | A(M)^U(M)^G(M)^C(M)^U(M)^C(M)^U(M)^U(M)^U(M)^G(M)^G | 5142.00 | 78 |
| | | (M)^U(M)^G(M)^C(M)^C(M) | | |
| 73 | 21-15-A | A(M)^A(M)^U(M)^G(M)^C(M)^U(M)^C(M)^U(M)^U(M)^U(M)^G | 5164.34 | 79 |
| | | (M)^G(M)^U(M)^G(M)^C(M) | | |
| 74 | 1-25-A | G(M)^G(M)^U(M)^G(M)^C(M)^C(M)^C(M)^G(M)^A(M)^A(M)^G | 8759.74 | 80 |
| | | (M)^A(M)^U(M)^A(M)^C(M)^A(M)^G(M)^U(M)^U(M)^U(M)^U | | |
| | | (M)^C(M)^G(M)^A(M)^A(M) | | |
| 75 | 3-25-A | U(M)^U(M)^G(M)^G(M)^U(M)^G(M)^C(M)^C(M)^C(M)^G(M)^A | 8715.63 | 81 |
| | | (M)^A(M)^G(M)^A(M)^U(M)^A(M)^C(M)^A(M)^G(M)^U(M)^U | | |
| | | (M)^U(M)^U(M)^C(M)^G(M) | | |
| 76 | 5-25-A | C(M)^U(M)^U(M)^U(M)^G(M)^G(M)^U(M)^G(M)^C(M)^C(M)^C | 8674.34 | 82 |
| | | (M)^G(M)^A(M)^A(M)^G(M)^A(M)^U(M)^A(M)^C(M)^A(M)^G | | |
| | | (M)^U(M)^U(M)^U(M)^U(M) | | |
| 77 | 7-25-A | C(M)^U(M)^C(M)^U(M)^U(M)^U(M)^G(M)^G(M)^U(M)^G(M)^C | 8671.30 | 83 |
| | | (M)^C(M)^C(M)^G(M)^A(M)^A(M)^G(M)^A(M)^U(M)^A(M)^C | | |
| | | (M)^A(M)^G(M)^U(M)^U(M) | | |
| 78 | 9-25-A | U(M)^G(M)^C(M)^U(M)^C(M)^U(M)^U(M)^U(M)^G(M)^G(M)^U | 8709.38 | 84 |
| | | (M)^G(M)^C(M)^C(M)^C(M)^G(M)^A(M)^A(M)^G(M)^A(M)^U | | |
| | | (M)^A(M)^C(M)^A(M)^G(M) | | |
| 79 | 11-25-A | A(M)^A(M)^U(M)^G(M)^C(M)^U(M)^C(M)^U(M)^U(M)^U(M)^G | 8694.16 | 85 |
| | | (M)^G(M)^U(M)^G(M)^C(M)^C(M)^C(M)^G(M)^A(M)^A(M)^G | | |
| | | (M)^A(M)^U(M)^A(M)^C(M) | | |
| 80 | 1-20-B | 5(m)^5(m)^G(m)^A(m)^A(m)^G(m)^A(m)^T(m)^A(m)^5(m)^A | 7968.6 | 107 |
| | | (m)^G(m)^T(m)^T(m)^T(m)^T(m)^5(m)^G(m)^A(m)^A(m) | | |

TABLE 2-5

| | | | Molecular | |
|---|---|---|---|---|
| | Sequence | | weight | SEQ |
| Example | name | Sequence (5′ −> 3′) | (found) | ID NO |
| 81 | 6-20-B | G(m)^G(m)^T(m)^G(m)^5(m)^5(m)^5(m)^G(m)^A(m)^A(m)^G | 7998.45 | 129 |
| | | (m)^A(m)^T(m)^A(m)^5(m)^A(m)^G(m)^T(m)^T(m)^T(m) | | |
| 82 | 7-20-B | T(m)^G(m)^G(m)^T(m)^G(m)^5(m)^5(m)^5(m)^G(m)^A(m)^A | 7999.87 | 131 |
| | | (m)^G(m)^A(m)^T(m)^A(m)^5(m)^A(m)^G(m)^T(m)^T(m) | | |
| 83 | 8-20-D | T(m)^T(m)^G(m)^G(m)^T(m)^G(m)^5(m)^5(m)^5(m)^G(m)^A | 7998.59 | 133 |
| | | (m)^A(m)^G(m)^A(m)^T(m)^A(m)^5(m)^A(m)^G(m)^T(m) | | |
| 84 | 9-20-B | T(m)^T(m)^T(m)^G(m)^G(m)^T(m)^G(m)^5(m)^5(m)^5(m)^G | 7999.78 | 135 |
| | | (m)^A(m)^A(m)^G(m)^A(m)^T(m)^A(m)^5(m)^A(m)^G(m) | | |
| 85 | 10-20-B | 5(m)^T(m)^T(m)^T(m)^G(m)^G(m)^T(m)^G(m)^5(m)^5(m)^5 | 7972.81 | 105 |
| | | (m)^G(m)^A(m)^A(m)^G(m)^A(m)^T(m)^A(m)^5(m)^A(m) | | |
| 86 | 12-20-B | 5(m)^T(m)^5(m)^T(m)^T(m)^T(m)^G(m)^G(m)^T(m)^G(m)^5 | 7962.51 | 108 |
| | | (m)^5(m)^5(m)^G(m)^A(m)^A(m)^G(m)^A(m)^T(m)^A(m) | | |
| 87 | 14-20-B | T(m)^G(m)^5(m)^T(m)^5(m)^T(m)^T(m)^T(m)^G(m)^G(m)^T | 7981.56 | 110 |
| | | (m)^G(m)^5(m)^5(m)^5(m)^G(m)^A(m)^A(m)^G(m)^A(m) | | |
| 88 | 15-25-A | T(m)^A(m)^A(m)^5(m)^A(m)^A(m)^T(m)^G(m)^5(m)^T(m)^5 | 9981.03 | 86 |
| | | (m)^T(m)^T(m)^T(m)^G(m)^G(m)^T(m)^G(m)^5(m)^5(m)^5 | | |
| | | (m)^G(m)^A(m)^A(m)^G(m) | | |
| 89 | 15-24-A | A(m)^A(m)^5(m)^A(m)^A(m)^T(m)^G(m)^5(m)^T(m)^5(m)^T | 9584.24 | 87 |
| | | (m)^T(m)^T(m)^G(m)^G(m)^T(m)^G(m)^5(m)^5(m)^5(m)^G | | |
| | | (m)^A(m)^A(m)^G(m) | | |
| 90 | 15-23-A | A(m)^5(m)^A(m)^A(m)^T(m)^G(m)^5(m)^T(m)^5(m)^T(m)^T | 9181.7 | 88 |
| | | (m)^T(m)^G(m)^G(m)^T(m)^G(m)^5(m)^5(m)^5(m)^G(m)^A | | |
| | | (m)^A(m)^G(m) | | |
| 91 | 15-22-A | 5(m)^A(m)^A(m)^T(m)^G(m)^5(m)^T(m)^5(m)^T(m)^T(m)^T | 8777.73 | 89 |
| | | (m)^G(m)^G(m)^T(m)^G(m)^5(m)^5(m)^5(m)^G(m)^A(m)^A | | |
| | | (m)^G(m) | | |
| 92 | 15-21-A | A(m)^A(m)^T(m)^G(m)^5(m)^T(m)^5(m)^T(m)^T(m)^T(m)^G | 8386.13 | 90 |
| | | (m)^G(m)^T(m)^G(m)^5(m)^5(m)^5(m)^G(m)^A(m)^A(m)^G | | |
| | | (m) | | |
| 93 | 15-20-B | A(m)^T(m)^G(m)^5(m)^T(m)^5(m)^T(m)^T(m)^T(m)^G(m)^G | 7982.63 | 112 |
| | | (m)^T(m)^G(m)^5(m)^5(m)^5(m)^G(m)^A(m)^A(m)^G(m) | | |
| 94 | 15-19-A | T(m)^G(m)^5(m)^T(m)^5(m)^T(m)^T(m)^T(m)^G(m)^G(m)^T | 7579.98 | 91 |
| | | (m)^G(m)^5(m)^5(m)^5(m)^G(m)^A(m)^A(m)^G(m) | | |
| 95 | 15-18-A | G(m)^5(m)^T(m)^5(m)^T(m)^T(m)^T(m)^G(m)^G(m)^T(m)^G | 7180.3 | 92 |
| | | (m)^5(m)^5(m)^5(m)^G(m)^A(m)^A(m)^G(m) | | |
| 96 | 15-17-A | 5(m)^T(m)^5(m)^T(m)^T(m)^T(m)^G(m)^G(m)^T(m)^G(m)^5 | 6760.06 | 93 |
| | | (m)^5(m)^5(m)^G(m)^A(m)^A(m)^G(m) | | |
| 97 | 15-16-A | T(m)^5(m)^T(m)^T(m)^T(m)^G(m)^G(m)^T(m)^G(m)^5(m)^5 | 6370.01 | 94 |
| | | (m)^5(m)^G(m)^A(m)^A(m)^G(m) | | |
| 98 | 16-20-B | A(m)^A(m)^T(m)^G(m)^5(m)^T(m)^5(m)^T(m)^T(m)^T(m)^G | 7967.47 | 114 |
| | | (m)^G(m)^T(m)^G(m)^5(m)^5(m)^5(m)^G(m)^A(m)^A(m) | | |
| 99 | 16-19-A | A(m)^T(m)^G(m)^5(m)^T(m)^5(m)^T(m)^T(m)^T(m)^G(m)^G | 7563.25 | 95 |
| | | (m)^T(m)^G(m)^5(m)^5(m)^5(m)^G(m)^A(m)^A(m) | | |
| 100 | 16-18-A | T(m)^G(m)^5(m)^T(m)^5(m)^T(m)^T(m)^T(m)^G(m)^G(m)^T | 7160.51 | 96 |
| | | (m)^G(m)^5(m)^5(m)^5(m)^G(m)^A(m)^A(m) | | |

TABLE 2-6

| | | | Molecular | |
|---|---|---|---|---|
| | Sequence | | weight | SEQ |
| Example | Name | Sequence (5′ −> 3′) | (found) | ID NO |
| 101 | 16-17-A | G(m)^5(m)^T(m)^5(m)^T(m)^T(m)^T(m)^G(m)^G(m)^T(m)^G | 6763.91 | 97 |
| | | (m)^5(m)^5(m)^5(m)^G(m)^A(m)^A(m) | | |
| 102 | 16-16-A | 5(m)^T(m)^5(m)^T(m)^T(m)^T(m)^G(m)^G(m)^T(m)^G(m)^5 | 6348.15 | 98 |
| | | (m)^5(m)^5(m)^G(m)^A(m)^A(m) | | |
| 103 | 17-20-B | 5(m)^A(m)^A(m)^T(m)^G(m)^5(m)^T(m)^5(m)^T(m)^T(m)^T | 7954.62 | 116 |
| | | (m)^G(m)^G(m)^T(m)^G(m)^5(m)^5(m)^5(m)^G(m)^A(m) | | |
| 104 | 18-20-B | A(m)^5(m)^A(m)^A(m)^T(m)^G(m)^5(m)^T(m)^5(m)^T(m)^T | 7951.6 | 118 |
| | | (m)^T(m)^G(m)^G(m)^T(m)^G(m)^5(m)^5(m)^5(m)^G(m) | | |
| 105 | 19-20-B | A(m)^A(m)^5(m)^A(m)^A(m)^T(m)^G(m)^5(m)^T(m)^5(m)^T | 7934.75 | 119 |
| | | (m)^T(m)^T(m)^G(m)^G(m)^T(m)^G(m)^5(m)^5(m)^5(m) | | |
| 106 | 21-20-B | A(m)^T(m)^A(m)^A(m)^5(m)^A(m)^A(m)^T(m)^G(m)^5(m)^T | 7947.37 | 120 |
| | | (m)^5(m)^T(m)^T(m)^T(m)^G(m)^G(m)^T(m)^G(m)^5(m) | | |
| 107 | 25-20-B | G(m)^A(m)^T(m)^T(m)^A(m)^T(m)^A(m)^A(m)^5(m)^A(m)^A | 7935.52 | 121 |
| | | (m)^T(m)^G(m)^5(m)^T(m)^5(m)^T(m)^T(m)^T(m)^G(m) | | |
| 108 | 29-20-B | A(m)^5(m)^T(m)^T(m)^G(m)^A(m)^T(m)^T(m)^A(m)^T(m)^A | 7916.1 | 122 |
| | | (m)^A(m)^5(m)^A(m)^A(m)^T(m)^G(m)^5(m)^T(m)^5(m) | | |
| 109 | 30-20-B | T(m)^A(m)^5(m)^T(m)^T(m)^G(m)^A(m)^T(m)^T(m)^A(m)^T | 7918.18 | 123 |
| | | (m)^A(m)^A(m)^5(m)^A(m)^A(m)^T(m)^G(m)^5(m)^T(m) | | |
| 110 | 31-20-B | G(m)^T(m)^A(m)^5(m)^T(m)^T(m)^G(m)^A(m)^T(m)^T(m)^A | 7946.8 | 124 |
| | | (m)^T(m)^A(m)^A(m)^5(m)^A(m)^A(m)^T(m)^G(m)^5(m) | | |
| 111 | 34-20-B | 5(m)^T(m)^G(m)^G(m)^T(m)^A(m)^5(m)^T(m)^T(m)^G(m)^A | 7943.99 | 125 |
| | | (m)^T(m)^T(m)^A(m)^T(m)^A(m)^A(m)^5(m)^A(m)^A(m) | | |
| 112 | 36-20-B | A(m)^A(m)^5(m)^T(m)^G(m)^G(m)^T(m)^A(m)^5(m)^T(m)^T | 7944.95 | 126 |
| | | (m)^G(m)^A(m)^T(m)^T(m)^A(m)^T(m)^A(m)^A(m)^5(m) | | |
| 113 | 46-20-B | T(m)^A(m)^5(m)^T(m)^T(m)^A(m)^A(m)^T(m)^T(m)^5(m)^A | 7911.45 | 127 |
| | | (m)^A(m)^5(m)^T(m)^G(m)^G(m)^T(m)^A(m)^5(m)^T(m) | | |
| 114 | 51-20-B | 5(m)^T(m)^5(m)^T(m)^G(m)^T(m)^A(m)^5(m)^T(m)^T(m)^A | 7899.54 | 128 |
| | | (m)^A(m)^T(m)^T(m)^5(m)^A(m)^A(m)^5(m)^T(m)^G(m) | | |
| 115 | 8-20-E | T(m)^T(m)^G(m)^G(m)^T(m)^G(m)^5(m)^5(m)-5(m)^G(m)^A | 7980.98 | 133 |
| | | (m)^A(m)^G(m)^A(m)^T(m)^A(m)^5(m)^A(m)^G(m)^T(m) | | |
| 116 | 10-20-C | 5(m)^T(m)^T(m)^T(m)^G(m)^G(m)^T(m)^G(m)^5(m)^5(m)^5 | 7954.93 | 105 |
| | | (m)-G(m)^A(m)^A(m)^G(m)^A(m)^T(m)^A(m)^5(m)^A(m) | | |
| 117 | 12-20-C | 5(m)^T(m)^5(m)^T(m)^T(m)^T(m)^G(m)^G(m)^T(m)^G(m)-5 | 7943.55 | 108 |
| | | (m)^5(m)^5(m)^G(m)^A(m)^A(m)^G(m)^A(m)^T(m)^A(m) | | |
| 118 | 14-20-C | T(m)^G(m)^5(m)^T(m)^5(m)^T(m)^T(m)^T(m)^G(m)-G(m)^T | 7959.30 | 110 |
| | | (m)^G(m)^5(m)^5(m)^5(m)^G(m)^A(m)^A(m)^G(m)^A(m) | | |
| 119 | 16-20-C | A(N)*A(N)*T(N)*G(N)*C(N)*T(N)*C(N)*T(N)*T(N)*T(N)*G | 6782.40 | 115 |
| | | (N)*G(N)*T(N)*G(N)*C(N)*C(N)*C(N)*G(N)*A(N)*A(N) | | |
| 120 | 9-20-C | T(N)*T(N)*T(N)*G(N)*G(N)*T((N)*G(N)*C(N)*C(N)*C(N) | 6831.45 | 136 |
| | | *G(N)*A(N)*A(N)*G(N)*A(N)*T(N)*A(N)*C(N)*A(N)*G(N) | | |

TABLE 2-7

| | | | Molecular | |
|---|---|---|---|---|
| | Sequence | | weight | SEQ |
| Example | Name | Sequence (5′ −> 3′) | (found) | ID NO |
| 121 | 9-20-D | T(N)*T(N)*T(N)*C(N)*G(N)*T(N)*C(N)*C(N)*C(N)*C(N)*C | 6710.50 | 137 |
| | | (N)*A(N)*A(N)*C(N)*A(N)*T(N)*A(N)*G(N)*A(N)*G(N) | | |
| 122 | 6-20-C | G(N)*G(N)*T(N)*G(N)*C(N)*C(N)*C(N)*G(N)*A(N)*A(N)*G | 6828.90 | 130 |
| | | (N)*A(N)*T(N)*A(N)*C(N)*A(N)*G(N)*T(N)*T(N)*T(N) | | |
| 123 | 7-20-C | T(N)*G(N)*G(N)*T(N)*G(N)*C(N)*C(N)*C(N)*G(N)*A(N)*A | 6830.90 | 132 |
| | | (N)*G(N)*A(N)*T(N)*A(N)*C(N)*A(N)*G(N)*T(N)*T(N) | | |
| 124 | 8-20-F | T(N)*T(N)*G(N)*G(N)*T(N)*G(N)*C(N)*C(N)*C(N)*G(N)*A | 6832.20 | 134 |
| | | (N)*A(N)*G(N)*A(N)*T(N)*A(N)*C(N)*A(N)*G(N)*T(N) | | |
| 125 | 10-20-D | C(N)*T(N)*T(N)*T(N)*G(N)*G(N)*T(N)*G(N)*C(N)*C(N)*C | 6792.40 | 106 |
| | | (N)*G(N)*A(N)*A(N)*G(N)*A(N)*T(N)*A(N)*C(N)*A(N) | | |
| 126 | 12-20-D | C(N)*T(N)*C(N)*T(N)*T(N)*T(N)*G(N)*G(N)*T(N)*G(N)*C | 6782.40 | 109 |
| | | (N)*C(N)*C(N)*G(N)*A(N)*A(N)*G(N)*A(N)*T(N)*A(N) | | |
| 127 | 14-20-D | T(N)*G(N)*C(N)*T(N)*C(N)*T(N)*T(N)*T(N)*G(N)*G(N)*T | 6798.20 | 111 |
| | | (N)*G(N)*C(N)*C(N)*C(N)*G(N)*A(N)*A(N)*G(N)*A(N) | | |
| 128 | 15-20-C | A(N)*T(N)*G(N)*C(N)*T(N)*C(N)*T(N)*T(N)*T(N)*G(N)*G | 6798.50 | 113 |
| | | (N)*T(N)*G(N)*C(N)*C(N)*C(N)*G(N)*A(N)*A(N)*G(N) | | |
| 129 | 17-20-C | C(N)*A(N)*A(N)*T(N)*G(N)*C(N)*T(N)*C(N)*T(N)*T(N)*T | 6758.60 | 117 |
| | | (N)*G(N)*G(N)*T(N)*G(N)*C(N)*C(N)*C(N)*G(N)*A(N) | | |
| 130 | 10-19-A | T(m)^T(m)^T(m)^G(m)^G(m)^T(m)^G(m)^5(m)^5(m)^5(m)^G | 7576.06 | 99 |
| | | (m)^A(m)^A(m)^G(m)^A(m)^T(m)^A(m)^5(m)^A(m) | | |
| 131 | 10-18-A | T(m)^T(m)^G(m)^G(m)^T(m)^G(m)^5(m)^5(m)^5(m)^G(m)^A | 7182.37 | 100 |
| | | (m)^A(m)^G(m)^A(m)^T(m)^A(m)^5(m)^A(m) | | |
| 132 | 10-17-A | T(m)^G(m)^G(m)^T(m)^G(m)^5(m)^5(m)^5(m)^G(m)^A(m)^A | 6789.10 | 101 |
| | | (m)^G(m)^A(m)^T(m)^A(m)^5(m)^A(m) | | |
| 133 | 10-16-A | G(m)^G(m)^T(m)^G(m)^5(m)^5(m)^5(m)^G(m)^A(m)^A(m)^G | 6394.41 | 102 |
| | | (m)^A(m)^T(m)^A(m)^5(m)^A(m) | | |
| 134 | 12-19-A | T(m)^5(m)^T(m)^T(m)^T(m)^G(m)^G(m)^T(m)^G(m)^5(m)^5 | 7568.76 | 103 |
| | | (m)^5(m)^G(m)^A(m)^A(m)^G(m)^A(m)^T(m)^A(m) | | |
| 135 | 12-18-A | 5(m)^T(m)^T(m)^T(m)^G(m)^G(m)^T(m)^G(m)^5(m)^5(m)^5 | 7174.73 | 104 |
| | | (m)^G(m)^A(m)^A(m)^G(m)^A(m)^T(m)^A(m) | | |

[0235] Herein, any of the following signs or representations is occasionally used to represent the corresponding structure.

[chemical structure]

[chemical structure]

[chemical structure]

[chemical structure]

[chemical structure]

[chemical structure]

[chemical structure]

[chemical structure]

[chemical structure]

[chemical structure]

[chemical structure]

[chemical structure]

[0236] In the structural formulas shown above, R¹, R², and R³ each independently represent a hydrogen atom, a linear or branched alkyl group having one to six carbon atoms, or a cycloalkyl group having three to seven carbon atoms. Here, for GuNA indicated by “Gx” illustrated above, the case that R¹ and R³ are each a hydrogen atom and R² is a methyl group is indicated by “Gm”, the case that R¹ is a hydrogen atom and R² and R³ are each a methyl group is indicated by “Gdm”, and the case that R¹ and R³ are each a hydrogen atom and R² is a tert-butyl group is indicated by “GtB”.

### <<Evaluation of 27th Exon Skipping for Human WRN Gene>>

[0237] Evaluation of 27th exon skipping for a human WRN gene was performed by checking induction of exon 27 skipping in HEK293T cells and Werner syndrome patient fibroblasts with exon 26 deleted.

[0238] Gene expression evaluation in the present Examples is evaluation of the sequence structure of the 27th exon of a WRN gene by measuring the amount of amplification with use of a PCR method for a region ranging from exons 26 (for HEK293T having a normal WRN gene) or 25 (for Werner syndrome patient fibroblasts with exon 26 deleted) to 29 of the WRN gene in complementary DNA (cDNA) given by reverse transcription reaction. Specific procedures of expression evaluations will be described in the following.

(Introduction of Antisense Oligonucleotide into Cells)

[0239] “Cells expressing a human WRN gene” were treated with an antisense oligonucleotide by means of introduction by, for example, lipofection or direct addition for 2 days. The cells used were cells expressing a WRN gene (e.g., HEK293T cells or Werner syndrome patient fibroblasts with exon 26 deleted). The cells treated with the antisense oligonucleotide were collected immediately after the treatment, or collected after being continuously cultured with the antisense oligonucleotide removed.

(Analysis of WRN cDNA)

[0240] Reverse transcription reaction was performed for the total RNA extracted from the cells collected, and, for the resulting cDNA, a region ranging from exon 26 to exon 29 of a WRN gene (in using HEK293T cells having a normal WRN gene) or a region ranging from exon 25 to exon 29 of a WRN gene (in using Werner syndrome patient fibroblasts with exon 26 deleted) was amplified by using a PCR method. In this amplification, the annealing temperature was set to 60° C.

### (Confirmation of Skipping of Exon 27)

[0241] Amplification of the region from exons 26 to 29 of WRN cDNA from HEK293T having a normal WRN gene in the described manner without addition of an antisense oligonucleotide gave a band of 290 base pairs. Determination of the nucleotide sequence of this amplification product by a conventional method showed that the amplification product consisted of exon 26, exon 27, exon 28, and exon 29.

[0242] Likewise, amplification of a region from exon 25 to exon 29 of WRN cDNA from Werner syndrome patient fibroblasts with exon 26 deleted without addition of an antisense oligonucleotide gave a band of 290 base pairs. Determination of the nucleotide sequence of this amplification product by a conventional method showed that the amplification product consisted of exon 25, exon 27, exon 28, and exon 29. This result agreed quite well with a result of gene analysis for the patient.

[0243] For cDNA from the HEK293T cells with introduction of an antisense oligonucleotide therein, on the other hand, not only an amplification product having the same size as the amplification product given by the cells without introduction of an antisense oligonucleotide therein was given, but also an amplification product of small size was given after culturing for 48 hours. Determination of the nucleotide sequence of this amplification product by a conventional method showed that the amplification product consisted of exon 26, exon 28, and exon 29. Under those conditions, only a transcript of small size, that is, with exon 27 skipped was given.

[0244] For cDNA from the Werner syndrome patient fibroblasts described above with introduction of an antisense oligonucleotide therein, an amplification product of smaller size than the amplification product given by the cells without introduction of an antisense oligonucleotide therein was given. Determination of the nucleotide sequence of this amplification product of small size found that the sequence of exon 25 was directly connecting to the sequence of exon 28, revealing deletion of exon 26 and exon 27. This suggests that the antisense oligonucleotide treatment allowed exon 27 to be skipped.

[0245] Also for an mRNA precursor transcribed from a gene having the normal human WRN gene structure in splicing reactions, the present inventors confirmed that the designed antisense oligonucleotides effectively induced skipping of exon 27. Also for Werner syndrome patient fibroblasts having the skipping mutation c.3139-1G>C in the 26th exon (Werner syndrome patient fibroblasts with exon 26 deleted), the present inventors confirmed that the designed antisense oligonucleotides effectively induced skipping of exon 27. Hereinafter, the present invention will be described in more detail on the basis of different tests.

### <<Evaluation of Induction of Exon 27 Skipping for WRN Gene>>

[0246] For each single-stranded antisense oligonucleotide produced, evaluation of induction of exon 27 skipping for a WRN gene was carried out in different ways: evaluation using human embryonic kidney cells, HEK293T cells, and evaluation using Werner syndrome patient fibroblasts having the skip mutation c.3139-1G>C in the 26th exon. The specific procedures will be described in the following.

### <Evaluation of Induction of Exon 27 Skipping Using Human Embryonic Kidney Cells, HEK293T Cells>

[0247] Human embryonic kidney cells, HEK293T cells (ATCC (R) CRL-3216 (TM)), were cultured in a culture medium under conditions of 37° C. and 5% CO₂. The culture medium used for HEK293T cells was one having the following composition.

### Composition of Culture Medium for HEK293T Cells

[0248] Dulbecco's modified Eagle's medium (DMEM): manufactured by Thermo Fisher Scientific, Cat #11995
[0249] 10% fetal bovine serum (FBS): manufactured by Thermo Fisher Scientific, Cat #10437028

[0250] First, the day before transfection, HEK293T cells were seeded in a 96-well plate (12000 cells/well), and cultured overnight under conditions of 37° C. and 5% CO₂. Thereafter, cells were transfected with a single-stranded antisense oligonucleotide diluted with phosphate-buffered saline (PBS) (50 nM) by means of lipofection. Cells transfected with PBS dissolving no single-stranded antisense oligonucleotide therein were used as a negative control group. The cells after transfection were cultured in a culture medium for 48 hours under conditions of 37° C. and 5% CO₂. Thereafter, the culture medium was removed, and reverse transcription reaction was performed for extracted total RNAs by using a Taqman Fast Cells-to-CT Kit (manufactured by Thermo Fisher Scientific, Cat #4399003). For the complementary DNAs (cDNAs) resulting from the reverse transcription reaction, PCR was performed over exon 25 to exon 29 of a WRN gene with use of specific primers designed in advance (see below).

[0251] The program used for the PCR was as follows.
[0252] 94° C., for 1 minute: thermal denaturation
[0253] [98° C., for 10 seconds; 60° C., for 5 seconds; 68° C., for 40 seconds]×35 cycles: PCR amplification

[0254] The gene-specific primers used were WRN_Exon26_Fw and WRN_Exon29_Rv.

WRN_Exon26_Fw:
5′-CTCAGAGCCTCATCCTTCAAGCTAATG-3′
WRN_Exon29_Rv:
5′-CAATCTGAGTCTCCTGCTCTTGTGC-3′

[0255] The reaction products of the PCR reaction were separated by 3% agarose gel electrophoresis, and gel photographs were taken using a photographic system constructed by combining the LED transilluminator GELmieru (Wako Pure Chemical Industries, Ltd.) and an iPhone 8 (Apple Inc.).

[0256] FIG. 5 shows the experimental results of measurement of the skipping activities of single-stranded antisense oligonucleotides (FIG. 4) for exon 27 of a human WRN gene as determined for a human WRN mRNA precursor with the method described above.

[0257] For a sample without introduction of an antisense oligonucleotide therein (labeled with “WITHOUT ADDITION” in FIG. 5), amplification of a region from exon 26 to exon 29 of WRN cDNA from HEK293T cells having a normal WRN gene gave a band of 291 base pairs. Determination of the nucleotide sequence of this amplification product by DNA sequencing showed that this band consisted of exon 26, exon 27, exon 28, and exon 29.

[0258] On the other hand, cDNA from HEK293T cells with the addition of one of the antisense oligonucleotides, not only gave an amplification product of the same size as the amplification product given by the cells without the introduction of an antisense oligonucleotide, but also a small amplification product (215 base pairs) after 48 hours of culture. Determination of the nucleotide sequence of this amplification product by sequencing showed that the amplification product consisted of exon 26, exon 28, and exon 29. Under these conditions, an antisense oligonucleotide was also given with which only found amplification products of small size, that is, with high efficiency skipping activity for exon 27.

[0259] The PCR products with exon 27 skipped, “215 bp, A”, and the PCR products without exon 27 skipped, “291 bp, B” were quantified by using ImageJ (US NIH). The measurements of “A” and “B” were applied to a calculation formula below to determine the skipping efficiencies (%). The results are shown in Table 3-1 to Table 3-3.

$$Skipping efficiency ( \% ) = 100 \times A / ( A + B )$$

TABLE 3-1

| | | WRN Exon27 |
|---|---|---|
| | | skipping efficiency |
| Sequence name | SEQ ID NO | @ 50 nM |
| (—)10-20-A | 7 | 0.0 |
| (—)5-20-A | 8 | 12.4 |
| 1-20-A | 9 | 100.0 |
| 2-20-A | 10 | 37.6 |
| 3-20-A | 11 | 61.7 |
| 4-20-A | 12 | 59.6 |
| 5-20-A | 13 | 0.0 |
| 6-20-A | 14 | 96.9 |
| 7-20-A | 15 | 93.5 |
| 8-20-A | 16 | 98.8 |
| 8-20-B | 17 | 100.0 |
| 8-20-C | 18 | 0.0 |
| 9-20-A | 19 | 100.0 |
| 10-20-A | 20 | 100.0 |
| 11-20-A | 21 | 0.0 |
| 12-20-A | 22 | 100.0 |
| 13-20-A | 23 | 0.0 |
| 14-20-A | 24 | 100.0 |
| 15-20-A | 25 | 100.0 |
| 16-20-A | 26 | 91.2 |
| 17-20-A | 27 | 92.9 |
| 18-20-A | 28 | 100.0 |
| 19-20-A | 29 | 100.0 |
| 20-20-A | 30 | 36.7 |
| 21-20-A | 31 | 85.1 |
| 22-20-A | 32 | 0.0 |

TABLE 3-2

| | | WRN Exon27 |
|---|---|---|
| | | skipping efficiency |
| Sequence name | SEQ ID NO | @ 50 nM |
| 23-20-A | 33 | 0.0 |
| 24-20-A | 34 | 43.6 |
| 25-20-A | 35 | 39.6 |
| 26-20-A | 36 | 0.0 |
| 27-20-A | 37 | 0.0 |
| 28-20-A | 38 | 0.0 |
| 29-20-A | 39 | 100.0 |
| 30-20-A | 40 | 100.0 |
| 31-20-A | 41 | 0.0 |
| 32-20-A | 42 | 0.0 |
| 33-20-A | 43 | 0.0 |
| 34-20-A | 44 | 100.0 |
| 35-20-A | 45 | 0.0 |
| 36-20-A | 46 | 0.0 |
| 37-20-A | 47 | 0.0 |
| 38-20-A | 48 | 7.3 |
| 39-20-A | 49 | 0.0 |
| 40-20-A | 50 | 0.0 |
| 41-20-A | 51 | 5.9 |
| 46-20-A | 52 | 0.0 |
| 51-20-A | 53 | 0.0 |
| 56-20-A | 54 | 3.4 |
| 62-20-A | 55 | 39.5 |
| 63-20-A | 56 | 0.0 |
| 66-20-A | 57 | 0.0 |
| 70-20-A | 58 | 0.0 |

TABLE 3-3

| | | WRN Exon27 |
|---|---|---|
| | | skipping efficiency |
| Sequence name | SEQ ID NO | @ 50 nM |
| 1-15-A | 59 | 0.0 |
| 2-15-A | 60 | 0.0 |
| 3-15-A | 61 | 0.0 |
| 4-15-A | 62 | 0.0 |
| 5-15-A | 63 | 0.0 |
| 6-15-A | 64 | 0.0 |
| 7-15-A | 65 | 0.0 |
| 8-15-A | 66 | 0.0 |
| 9-15-A | 67 | 0.0 |
| 10-15-A | 68 | 21.6 |
| 11-15-A | 69 | 40.2 |
| 12-15-A | 70 | 17.6 |
| 13-15-A | 71 | 18.1 |
| 14-15-A | 72 | 24.8 |
| 15-15-A | 73 | 91.4 |
| 16-15-A | 74 | 44.5 |
| 17-15-A | 75 | 4.0 |
| 18-15-A | 76 | 24.9 |
| 19-15-A | 77 | 0.0 |
| 20-15-A | 78 | 9.4 |
| 21-15-A | 79 | 13.9 |
| 1-25-A | 80 | 100.0 |
| 3-25-A | 81 | 100.0 |
| 5-25-A | 82 | 60.0 |
| 7-25-A | 83 | 100.0 |
| 9-25-A | 84 | 89.8 |
| 11-25-A | 85 | 100.0 |

### <Confirmation of the Mutated Form of the WRN Gene in Werner Syndrome Patient Fibroblasts>

[0260] Werner syndrome patient fibroblasts (Coriell Cell Repositories, Cat #AG12795) were cultured in a culture medium under conditions of 37° C. and 5% CO₂. The culture medium used for Werner syndrome patient fibroblasts had the following composition.

### Composition of Culture Medium for Werner Syndrome Patient Fibroblasts

[0261] Eagle's minimum essential medium (MEM): manufactured by Sigma-Aldrich Co. LLC, Cat #M5650
[0262] 15% FBS: manufactured by Thermo Fisher Scientific, Cat #10437028

[0263] Gene mutation analysis was performed for the mutated form of a WRN gene in the Werner syndrome patient fibroblasts. Werner syndrome patient fibroblasts were seeded in a 96-well plate (10000 cells/well), and cultured overnight under conditions of 37° C. and 5% CO₂. Thereafter, genomic DNA of the cells was extracted, and PCR was performed over exon 25 to exon 29 of a WRN gene using specific primers designed in advance (see below).

[0264] The program used for the PCR was as follows.
[0265] 94° C., for 1 minute: thermal denaturation
[0266] [98° C., for 10 seconds; 60° C., for 5 seconds; 68° C., for 40 seconds]×35 cycles: PCR amplification

[0267] The gene-specific primers used were WRN_Exon25_Fw and WRN_Exon29_Rv.

WRN_Exon25_Fw:
5′-CTGGCAAGGATCAAACAGAGAGTTG-3′
WRN_Exon29_Rv:
5′-CAATCTGAGTCTCCTGCTCTTGTGC-3′

[0268] The reaction products of the PCR reaction were separated by 3% agarose gel electrophoresis, amplified PCR fragments were detected by using the LED transilluminator GELmieru (Wako Pure Chemical Industries, Ltd.), and a portion of the gel containing the PCR fragments was excised. The amplified PCR fragments were purified and subjected to analysis by sequencing, which confirmed that the Werner syndrome patient fibroblasts were a homozygous for c.3139-1G>C for a WRN gene.

<Evaluation of Induction of Exon 27 Skipping with Werner Syndrome Patient Fibroblasts>

[0269] Next, the induction of exon 27 skipping for a WRN gene was evaluated using the Werner syndrome patient fibroblasts that were a homozygote of c.3139-1G>C for a WRN gene. The day before transfection, Werner syndrome patient fibroblasts were seeded in a 96-well plate (10000 cells/well), and cultured overnight under conditions of 37° C. and 5% CO₂. The cells were then treated with an antisense oligonucleotide for 48 hours to 10 days by of lipofection. The cells were transfected with a single-stranded antisense oligonucleotide diluted with PBS (final concentration: 1 to 50 nM) by lipofection. Cells transfected with PBS, which does not dissolve single-stranded antisense oligonucleotide, therein were used as a negative control group. The cells treated with the antisense oligonucleotide were cultured in a culture medium for 48 hours or 240 hours under conditions of 37° C. and 5% CO₂. The culture medium was then removed, and reverse transcription reaction was performed on extracted total RNAs by using a Taqman Fast Cells-to-CT Kit (manufactured by Thermo Fisher Scientific, Cat #4399003). For the complementary DNAs (cDNAs) resulting from the reverse transcription reaction, PCR was performed over exon 25 to exon 29 of a WRN gene using specific primers designed in advance (see below). The program used for the PCR was as follows.
[0270] 94° C., for 1 minute: thermal denaturation
[0271] [98° C., for 10 seconds; 60° C., for 5 seconds; 68° C., for 40 seconds]×35 cycles: PCR amplification

[0272] The gene-specific primers used were WRN_Exon25_Fw and WRN_Exon29_Rv.

WRN_Exon25_Fw:
5′-CTGGCAAGGATCAAACAGAGAGTTG-3′
WRN_Exon29_Rv:
5′-CAATCTGAGTCTCCTGCTCTTGTGC-3′

[0273] The reaction products of the PCR reaction were separated by 3% agarose gel electrophoresis, and gel photographs were taken using a photographic system constructed by combining the LED transilluminator GELmieru (Wako Pure Chemical Industries, Ltd.) and an iPhone 8 (Apple Inc.).

[0274] FIG. 6 shows experimental results of measuring of the skipping activities of single-stranded antisense oligonucleotides for exon 27 of a human WRN gene as determined for a human WRN mRNA precursor by the method described above. For a sample without introduction of an antisense oligonucleotide into it (labelled with “WITHOUT ADDITION” in FIG. 6), amplification of a region from exon 25 to exon 29 of WRN cDNA from Werner syndrome patient fibroblasts gave a band of 352 base pairs. Determination of the nucleotide sequence of this amplification product by sequencing showed that this band consisted of exon 25, exon 27, exon 28, and exon 29. This result was in good agreement with the patient's genetic analysis.

[0275] For cDNA from the Werner syndrome patient fibroblasts with addition of an antisense oligonucleotide thereto, a product of smaller size (276 base pairs) than the product given by the cells without the addition of an antisense oligonucleotide therein was given. Determination of the nucleotide sequence of this smaller amplification product by sequencing showed that the sequence of exon 25 was directly linking to the sequence of exon 28, revealing a deletion of exon 26 and exon 27. This suggests that the antisense oligonucleotide treatment allowed exon 27 to be skipped.

[0276] The PCR products with exon 27 skipped, “276 bp, A”, and the PCR products without exon 27 skipped, “352 bp, B” were quantified by using ImageJ (US NIH). The measurements of “A” and “B” were applied to a calculation formula below to determine the skipping efficiencies (%). The results are shown in Tables 4-1A to 4-1F, Tables 4-2A to 4-2D, Tables 4-3A to 4-3D, Tables 4-4A to 4-4D, and Table 4-5.

$$Skipping efficiency ( \% ) = 100 \times A / ( A + B )$$

TABLE 4-1A

| | | WRN Exon27 |
|---|---|---|
| | | skipping efficiency |
| Sequence name | SEQ ID NO | @ 50 nM |
| (—)10-20-A | 7 | 8.6 |
| (—)5-20-A | 8 | 74.4 |
| 1-20-A | 9 | 100.0 |
| 2-20-A | 10 | 96.3 |
| 3-20-A | 11 | 100.0 |
| 4-20-A | 12 | 100.0 |
| 5-20-A | 13 | 100.0 |
| 6-20-A | 14 | 96.9 |
| 7-20-A | 15 | 62.2 |
| 8-20-A | 16 | 88.9 |
| 8-20-B | 17 | 100.0 |
| 8-20-C | 18 | 100.0 |
| 9-20-A | 19 | 100.0 |
| 10-20-A | 20 | 100.0 |
| 11-20-A | 21 | 100.0 |
| 12-20-A | 22 | 100.0 |
| 13-20-A | 23 | 100.0 |
| 14-20-A | 24 | 100.0 |
| 15-20-A | 25 | 100.0 |
| 16-20-A | 26 | 93.8 |
| 17-20-A | 27 | 66.7 |
| 18-20-A | 28 | 95.6 |
| 19-20-A | 29 | 100.0 |
| 20-20-A | 30 | 100.0 |
| 21-20-A | 31 | 99.6 |

TABLE 4-1B

| | | WRN Exon27 |
|---|---|---|
| | | skipping efficiency |
| Sequence name | SEQ ID NO | @ 50 nM |
| 22-20-A | 32 | 93.8 |
| 23-20-A | 33 | 83.4 |
| 24-20-A | 34 | 85.2 |
| 25-20-A | 35 | 100.0 |
| 26-20-A | 36 | 82.7 |
| 27-20-A | 37 | 84.7 |
| 28-20-A | 38 | 82.1 |
| 29-20-A | 39 | 83.5 |
| 30-20-A | 40 | 74.0 |
| 31-20-A | 41 | 98.6 |
| 32-20-A | 42 | 100.0 |
| 33-20-A | 43 | 70.3 |
| 34-20-A | 44 | 100.0 |
| 35-20-A | 45 | 100.0 |
| 36-20-A | 46 | 82.4 |
| 37-20-A | 47 | 100.0 |
| 38-20-A | 48 | 88.7 |
| 39-20-A | 49 | 98.8 |
| 40-20-A | 50 | 96.5 |
| 41-20-A | 51 | 13.7 |
| 46-20-A | 52 | 93.1 |
| 51-20-A | 53 | 73.0 |
| 56-20-A | 54 | 54.0 |
| 62-20-A | 55 | 81.0 |
| 63-20-A | 56 | 88.2 |

TABLE 4-1C

| | | WRN Exon27 |
|---|---|---|
| | | skipping efficiency |
| Sequence name | SEQ ID NO | @ 50 nM |
| 66-20-A | 57 | 19.3 |
| 70-20-A | 58 | 11.7 |
| 1-15-A | 59 | 25.7 |
| 2-15-A | 60 | 20.0 |
| 3-15-A | 61 | 15.3 |
| 4-15-A | 62 | 10.4 |
| 5-15-A | 63 | 12.1 |
| 6-15-A | 64 | 10.6 |
| 7-15-A | 65 | 21.5 |
| 8-15-A | 66 | 33.3 |
| 9-15-A | 67 | 27.8 |
| 10-15-A | 68 | 55.7 |
| 11-15-A | 69 | 81.2 |
| 12-15-A | 70 | 79.8 |
| 13-15-A | 71 | 73.3 |
| 14-15-A | 72 | 70.9 |
| 15-15-A | 73 | 85.4 |
| 16-15-A | 74 | 61.9 |
| 17-15-A | 75 | 72.8 |
| 18-15-A | 76 | 66.6 |
| 19-15-A | 77 | 50.5 |
| 20-15-A | 78 | 41.1 |
| 21-15-A | 79 | 58.3 |
| 1-25-A | 80 | 100.0 |
| 3-25-A | 81 | 100.0 |

TABLE 4-1D

| | | WRN Exon27 |
|---|---|---|
| | | skipping efficiency |
| Sequence name | SEQ ID NO | @ 50 nM |
| 5-25-A | 82 | 100.0 |
| 7-25-A | 83 | 100.0 |
| 9-25-A | 84 | 100.0 |
| 11-25-A | 85 | 100.0 |
| 1-20-B | 107 | 100.0 |
| 6-20-B | 129 | 100.0 |
| 7-20-B | 131 | 100.0 |
| 8-20-D | 133 | 100.0 |
| 9-20-B | 135 | 100.0 |
| 10-20-B | 105 | 100.0 |
| 12-20-B | 108 | 100.0 |
| 14-20-B | 110 | 100.0 |
| 15-25-A | 86 | 100.0 |
| 15-24-A | 87 | 100.0 |
| 15-23-A | 88 | 100.0 |
| 15-22-A | 89 | 100.0 |
| 15-21-A | 90 | 100.0 |
| 15-20-B | 112 | 100.0 |
| 15-19-A | 91 | 100.0 |
| 15-18-A | 92 | 100.0 |
| 15-17-A | 93 | 100.0 |
| 15-16-A | 94 | 100.0 |
| 16-20-B | 114 | 100.0 |
| 16-19-A | 95 | 100.0 |
| 16-18-A | 96 | 100.0 |

TABLE 4-1E

| | | WRN Exon27 |
|---|---|---|
| | | skipping efficiency |
| Sequence name | SEQ ID NO | @ 50 nM |
| 16-17-A | 97 | 100.0 |
| 16-16-A | 98 | 100.0 |
| 17-20-B | 116 | 100.0 |
| 18-20-B | 118 | 100.0 |
| 19-20-B | 119 | 100.0 |
| 21-20-B | 120 | 100.0 |
| 25-20-B | 121 | 100.0 |
| 29-20-B | 122 | 100.0 |
| 31-20-B | 123 | 100.0 |
| 31-20-B | 124 | 100.0 |
| 34-20-B | 125 | 100.0 |
| 36-20-B | 126 | 100.0 |
| 46-20-B | 127 | 100.0 |
| 51-20-B | 128 | 100.0 |
| 8-20-E | 133 | 100.0 |
| 10-20-C | 105 | 100.0 |
| 12-20-C | 108 | 100.0 |
| 14-20-C | 110 | 100.0 |
| 16-20-C | 115 | 62.2 |
| 9-20-C | 136 | 70.2 |
| 9-20-D | 137 | 0.0 |
| 6-20-C | 130 | 60.8 |
| 7-20-C | 132 | 51.7 |
| 8-20-F | 134 | 56.4 |
| 10-20-D | 106 | 34.8 |

TABLE 4-1F

| | | WRN Exon27 |
|---|---|---|
| | | skipping efficiency |
| Sequence name | SEQ ID NO | @ 50 nM |
| 12-20-D | 109 | 34.6 |
| 14-20-D | 111 | 28.7 |
| 15-20-C | 113 | 32.5 |
| 17-20-C | 117 | 24.2 |
| 10-19-A | 99 | 100.0 |
| 10-18-A | 100 | 100.0 |
| 10-17-A | 101 | 100.0 |
| 10-16-A | 102 | 100.0 |
| 12-19-A | 103 | 100.0 |
| 12-18-A | 104 | 100.0 |

TABLE 4-2A

| | | WRN Exon27 |
|---|---|---|
| | | skipping efficiency |
| Sequence name | SEQ ID NO | @ 10 nM |
| 1-20-A | 9 | 39.7 |
| 6-20-A | 14 | 100.0 |
| 7-20-A | 15 | 57.7 |
| 8-20-A | 16 | 100.0 |
| 8-20-B | 17 | 100.0 |
| 8-20-C | 18 | 100.0 |
| 9-20-A | 19 | 100.0 |
| 10-20-A | 20 | 100.0 |
| 12-20-A | 22 | 100.0 |
| 14-20-A | 24 | 100.0 |
| 15-20-A | 25 | 100.0 |
| 16-20-A | 26 | 55.5 |
| 17-20-A | 27 | 100.0 |
| 18-20-A | 28 | 100.0 |
| 19-20-A | 29 | 50.6 |
| 21-20-A | 31 | 70.9 |
| 25-20-A | 35 | 20.3 |
| 29-20-A | 39 | 7.9 |
| 30-20-A | 40 | 10.0 |
| 31-20-A | 41 | 23.9 |
| 34-20-A | 44 | 24.5 |
| 36-20-A | 46 | 29.1 |
| 46-20-A | 52 | 46.8 |
| 51-20-A | 53 | 52.1 |
| 1-25-A | 80 | 89.3 |
| 3-25-A | 81 | 95.5 |

TABLE 4-2B

| | | WRN Exon27 |
|---|---|---|
| | | skipping efficiency |
| Sequence name | SEQ ID NO | @ 10 nM |
| 5-25-A | 82 | 85.4 |
| 7-25-A | 83 | 90.5 |
| 9-25-A | 84 | 90.4 |
| 11-25-A | 85 | 75.7 |
| 1-20-B | 107 | 51.9 |
| 6-20-B | 129 | 100.0 |
| 7-20-B | 131 | 100.0 |
| 8-20-D | 133 | 100.0 |
| 9-20-B | 135 | 100.0 |
| 10-20-B | 105 | 100.0 |
| 12-20-B | 108 | 100.0 |
| 14-20-B | 110 | 100.0 |
| 15-25-A | 86 | 100.0 |
| 15-24-A | 87 | 24.1 |
| 15-23-A | 88 | 44.9 |
| 15-22-A | 89 | 33.4 |
| 15-21-A | 90 | 71.7 |
| 15-20-B | 112 | 100.0 |
| 15-19-A | 91 | 100.0 |
| 15-18-A | 92 | 74.6 |
| 15-17-A | 93 | 63.5 |
| 15-16-A | 94 | 81.4 |
| 16-20-B | 114 | 77.7 |
| 16-19-A | 95 | 100.0 |
| 16-18-A | 96 | 100.0 |

TABLE 4-2C

| | | WRN Exon27 |
|---|---|---|
| | | skipping efficiency |
| Sequence name | SEQ ID NO | @ 10 nM |
| 16-17-A | 97 | 19.4 |
| 16-16-A | 98 | 100.0 |
| 17-20-B | 116 | 62.1 |
| 18-20-B | 118 | 51.3 |
| 19-20-B | 119 | 100.0 |
| 21-20-B | 120 | 86.1 |
| 25-20-B | 121 | 58.5 |
| 29-20-B | 122 | 64.4 |
| 30-20-B | 123 | 62.3 |
| 31-20-B | 124 | 100.0 |
| 34-20-B | 125 | 100.0 |
| 36-20-B | 126 | 33.6 |
| 46-20-B | 127 | 100.0 |
| 51-20-B | 128 | 100.0 |
| 8-20-E | 133 | 66.7 |
| 10-20-C | 105 | 69.8 |
| 12-20-C | 108 | 67.4 |
| 14-20-C | 110 | 89.4 |
| 16-20-C | 115 | 34.3 |
| 9-20-C | 136 | 36.6 |
| 9-20-D | 137 | 0.0 |
| 6-20-C | 130 | 30.3 |
| 7-20-C | 132 | 24.2 |
| 8-20-F | 134 | 22.6 |
| 10-20-D | 106 | 18.2 |

TABLE 4-2D

| | | WRN Exon27 |
|---|---|---|
| | | skipping efficiency |
| Sequence name | SEQ ID NO | @ 10 nM |
| 12-20-D | 109 | 14.7 |
| 14-20-D | 111 | 12.9 |
| 15-20-C | 113 | 29.3 |
| 17-20-C | 117 | 20.1 |
| 10-19-A | 99 | 62.2 |
| 10-18-A | 100 | 69.4 |
| 10-17-A | 101 | 75.4 |
| 10-16-A | 102 | 58.0 |
| 12-19-A | 103 | 57.2 |
| 12-18-A | 104 | 65.5 |

TABLE 4-3A

| | | WRN Exon27 |
|---|---|---|
| | | skipping efficiency |
| Sequence name | SEQ ID NO | @ 3 nM |
| 1-20-A | 9 | 9.3 |
| 6-20-A | 14 | 67.7 |
| 7-20-A | 15 | 50.2 |
| 8-20-A | 16 | 49.2 |
| 8-20-B | 17 | 100.0 |
| 8-20-C | 18 | 63.8 |
| 9-20-A | 19 | 50.7 |
| 10-20-A | 20 | 38.8 |
| 12-20-A | 22 | 71.8 |
| 14-20-A | 24 | 48.6 |
| 15-20-A | 25 | 50.5 |
| 16-20-A | 26 | 22.8 |
| 17-20-A | 27 | 50.1 |
| 18-20-A | 28 | 46.8 |
| 19-20-A | 29 | 46.7 |
| 21-20-A | 31 | 13.2 |
| 25-20-A | 35 | 4.3 |
| 29-20-A | 39 | 13.5 |
| 30-20-A | 40 | 7.7 |
| 31-20-A | 41 | 4.8 |
| 34-20-A | 44 | 8.2 |
| 36-20-A | 46 | 14.6 |
| 46-20-A | 52 | 10.5 |
| 51-20-A | 53 | 20.6 |
| 1-25-A | 80 | 33.9 |
| 3-25-A | 81 | 31.6 |
| 5-25-A | 82 | 31.7 |

TABLE 4-3B

| | | WRN Exon27 |
|---|---|---|
| | | skipping efficiency |
| Sequence name | SEQ ID NO | @ 3 nM |
| 7-25-A | 83 | 34.2 |
| 9-25-A | 84 | 34.6 |
| 11-25-A | 85 | 36.2 |
| 1-20-B | 107 | 0.0 |
| 6-20-B | 129 | 50.0 |
| 7-20-B | 131 | 42.2 |
| 8-20-D | 133 | 46.5 |
| 9-20-B | 135 | 52.5 |
| 10-20-B | 105 | 79.8 |
| 12-20-B | 108 | 51.3 |
| 14-20-B | 110 | 51.5 |
| 15-25-A | 86 | 79.3 |
| 15-24-A | 87 | 15.1 |
| 15-23-A | 88 | 0.0 |
| 15-22-A | 89 | 9.6 |
| 15-21-A | 90 | 0.0 |
| 15-20-B | 112 | 87.7 |
| 15-19-A | 91 | 60.0 |
| 15-18-A | 92 | 15.3 |
| 15-17-A | 93 | 30.8 |
| 15-16-A | 94 | 16.4 |
| 16-20-B | 114 | 14.3 |
| 16-19-A | 95 | 0.0 |
| 16-18-A | 96 | 31.2 |
| 16-17-A | 97 | 22.5 |

TABLE 4-3C

| | | WRN Exon27 |
|---|---|---|
| | | skipping efficiency |
| Sequence name | SEQ ID NO | @ 3 nM |
| 16-16-A | 98 | 15.7 |
| 17-20-B | 116 | 36.4 |
| 18-20-B | 118 | 45.5 |
| 19-20-B | 119 | 42.0 |
| 21-20-B | 120 | 8.8 |
| 25-20-B | 121 | 37.7 |
| 29-20-B | 122 | 11.9 |
| 30-20-B | 123 | 0.0 |
| 31-20-B | 124 | 82.1 |
| 34-20-B | 125 | 100.0 |
| 36-20-B | 126 | 21.2 |
| 46-20-B | 127 | 50.1 |
| 51-20-B | 128 | 0.0 |
| 8-20-E | 133 | 37.9 |
| 10-20-C | 105 | 27.9 |
| 12-20-C | 108 | 61.7 |
| 14-20-C | 110 | 66.9 |
| 16-20-C | 115 | 26.1 |
| 9-20-C | 136 | 26.0 |
| 9-20-D | 137 | 0.0 |
| 6-20-C | 130 | 17.6 |
| 7-20-C | 132 | 7.2 |
| 8-20-F | 134 | 1.3 |
| 10-20-D | 106 | 9.8 |
| 12-20-D | 109 | 13.8 |

TABLE 4-3D

| | | WRN Exon27 |
|---|---|---|
| | | skipping efficiency |
| Sequence name | SEQ ID NO | @ 3 nM |
| 14-20-D | 111 | 7.7 |
| 15-20-C | 113 | 0.0 |
| 17-20-C | 117 | 0.0 |
| 10-19-A | 99 | 17.9 |
| 10-18-A | 100 | 26.7 |
| 10-17-A | 101 | 45.5 |
| 10-16-A | 102 | 22.2 |
| 12-19-A | 103 | 28.0 |
| 12-18-A | 104 | 17.2 |

TABLE 4-4A

| | | WRN Exon27 |
|---|---|---|
| | | skipping efficiency |
| Sequence name | SEQ ID NO | @ 1 nM |
| 1-20-A | 9 | 5.8 |
| 6-20-A | 14 | 52.2 |
| 7-20-A | 15 | 20.0 |
| 8-20-A | 16 | 45.4 |
| 8-20-B | 17 | 30.8 |
| 8-20-C | 18 | 79.7 |
| 9-20-A | 19 | 25.1 |
| 10-20-A | 20 | 38.1 |
| 14-20-A | 24 | 47.2 |
| 15-20-A | 25 | 25.9 |
| 16-20-A | 26 | 36.7 |
| 17-20-A | 27 | 47.7 |
| 18-20-A | 28 | 47.7 |
| 19-20-A | 29 | 51.4 |
| 21-20-A | 31 | 5.9 |
| 25-20-A | 35 | 2.7 |
| 29-20-A | 39 | 14.7 |
| 30-20-A | 40 | 5.9 |
| 31-20-A | 41 | 1.3 |
| 34-20-A | 44 | 8.1 |
| 36-20-A | 46 | 10.4 |
| 46-20-A | 52 | 5.2 |
| 51-20-A | 53 | 10.1 |
| 1-25-A | 80 | 13.1 |
| 1-20-B | 107 | 0.0 |
| 6-20-B | 129 | 43.6 |

TABLE 4-4B

| | | WRN Exon27 |
|---|---|---|
| | | skipping efficiency |
| Sequence name | SEQ ID NO | @ 1 nM |
| 7-20-B | 131 | 36.0 |
| 8-20-D | 133 | 10.5 |
| 9-20-B | 135 | 51.6 |
| 10-20-B | 105 | 50.7 |
| 12-20-B | 108 | 49.8 |
| 14-20-B | 110 | 47.0 |
| 15-25-A | 86 | 66.1 |
| 15-24-A | 87 | 9.0 |
| 15-23-A | 88 | 0.0 |
| 15-22-A | 89 | 0.0 |
| 15-21-A | 90 | 0.0 |
| 15-20-B | 112 | 9.2 |
| 15-19-A | 91 | 15.2 |
| 15-18-A | 92 | 0.0 |
| 15-17-A | 93 | 0.0 |
| 15-16-A | 94 | 0.0 |
| 16-20-B | 114 | 18.7 |
| 16-19-A | 95 | 0.0 |
| 16-18-A | 96 | 0.0 |
| 16-17-A | 97 | 0.0 |
| 16-16-A | 98 | 0.0 |
| 17-20-B | 116 | 32.2 |
| 18-20-B | 118 | 46.3 |
| 19-20-B | 119 | 44.0 |
| 21-20-B | 120 | 17.4 |

TABLE 4-4C

| | | WRN Exon27 |
|---|---|---|
| | | skipping efficiency |
| Sequence name | SEQ ID NO | @ 1 nM |
| 25-20-B | 121 | 7.9 |
| 29-20-B | 122 | 11.9 |
| 30-20-B | 123 | 0.0 |
| 31-20-B | 124 | 23.2 |
| 34-20-B | 125 | 50.5 |
| 36-20-B | 126 | 0.0 |
| 46-20-B | 127 | 19.0 |
| 51-20-B | 128 | 0.0 |
| 8-20-E | 133 | 22.8 |
| 10-20-C | 105 | 25.8 |
| 12-20-C | 108 | 13.3 |
| 14-20-C | 110 | 11.9 |
| 16-20-C | 115 | 25.7 |
| 9-20-C | 136 | 25.5 |
| 9-20-D | 137 | 0.0 |
| 6-20-C | 130 | 15.7 |
| 7-20-C | 132 | 4.5 |
| 8-20-F | 134 | 3.1 |
| 10-20-D | 106 | 5.9 |
| 12-20-D | 109 | 10.0 |
| 14-20-D | 111 | 9.4 |
| 15-20-C | 113 | 0.0 |
| 17-20-C | 117 | 0.0 |
| 10-19-A | 99 | 7.1 |
| 10-18-A | 100 | 15.7 |

TABLE 4-4D

| | | WRN Exon27 |
|---|---|---|
| | | skipping efficiency |
| Sequence name | SEQ ID NO | @ 1 nM |
| 10-17-A | 101 | 10.6 |
| 10-16-A | 102 | 9.4 |
| 12-19-A | 103 | 11.5 |
| 12-18-A | 104 | 13.0 |

TABLE 4-5

| | | WRN Exon27 |
|---|---|---|
| | | skipping efficiency |
| Sequence name | SEQ ID NO | @ 10 nM, 240 h |
| 8-20-D | 133 | 100.0 |
| 15-25-A | 86 | 100.0 |
| 15-16-A | 94 | 100.0 |
| 16-20-B | 114 | 100.0 |
| 17-20-B | 116 | 100.0 |

<Induction of Expression of Functional WRN Protein with Antisense Oligonucleotide in Werner Syndrome Patient Fibroblasts>

[0277] The evaluation of the induction of the expression of a functional WRN protein by exon 27 skipping for a WRN gene was performed with Werner syndrome patient fibroblasts, that were homozygous for c.3139-1G>C for a WRN gene. The day before evaluation, Werner syndrome patient fibroblasts were seeded in a 96-well plate (10000 cells/well) and cultured overnight under conditions of 37° C. and 5% CO₂. Thereafter, the cells were transfected with a single-stranded antisense oligonucleotide consisting of a nucleotide sequence set forth in SEQ ID NO: 28 and diluted with PBS (final concentration: 50 nM) by means of lipofection. Cells transfected with PBS in which no single-stranded antisense oligonucleotide was dissolved were used as a negative control group. After transfection, the cells were cultured in a culture medium for 48 hours under conditions of 37° C. and 5% CO₂. Thereafter, the cells were fixed with 4% paraformaldehyde (FUJIFILM Wako Pure Chemical Corporation, Cat #163-20145) for 15 minutes, and incubated with 0.5% Triton-X (manufactured by NACALAI TESQUE, INC., Cat #12967-45) for 10 minutes. Subsequently, the incubated cells were blocked with PBS containing 5% goat serum for 1 hour, and incubated in anti-WRN antibody (manufactured by Cell Signaling Technology, Inc., Cat #4666) solution overnight. The cells were further incubated in anti-mouse IgG antibody (manufactured by Thermo Fisher Scientific, A32766) solution for 1 hour. Finally, the cells were incubated in Hoechst (R) 33342 nucleic acid staining (manufactured by Thermo Fisher Scientific, Cat #H3570) solution for 15 minutes, and observed under a fluorescence microscope.

[0278] FIG. 7 shows a result of induction of expression of a functional WRN protein by the skipping activity of the single-stranded antisense oligonucleotide for exon 27 of a WRN gene as determined for a human WRN mRNA precursor by the method described above. It is apparent from FIG. 7 that the cells transfected with the single-stranded antisense oligonucleotide consisting of the nucleotide sequence set forth in SEQ ID NO: 28 (“ASO: No. 28” in FIG. 7) have undergone nuclear localization of functional WRN protein.

<Promotion of Cell Growth with an Antisense Oligonucleotide in Werner Syndrome Patient Fibroblasts>

[0279] Evaluation of cell growth ability by exon 27 skipping for a WRN gene was performed using Werner syndrome patient fibroblasts that were homozygous for c.3139-1G>C for a human WRN gene. The day before evaluation, Werner syndrome patient fibroblasts were seeded in a 96-well plate (12000 cells/well), and cultured overnight under conditions of 37° C. and 5% CO₂. Thereafter, the cells were transfected with a single-stranded antisense oligonucleotide diluted with PBS (final concentration: 10 nM) by means of lipofection. Cells transfected with PBS, which does not dissolve single-stranded antisense oligonucleotide therein were used as a negative control group. The cells after transfection were cultured in culture medium for 288 hours under conditions of 37° C. and 5% CO₂. Thereafter, Celltiter-Glo 2.0 Assay (manufactured by Promega Corporation, Cat #G9242) was added to the culture medium, and the cell number was determined. The measurements of cell count of the cells transfected with the single-stranded antisense oligonucleotide, “A”, and the cell count of the negative control group, “B”, were applied to a calculation formula below to determine the cell growth rate (%). The results are shown in Table 5.

$$Cell growth rate ( \% ) = 100 \times ( A ) / B$$

TABLE 5

| | | Cell Growth Rate (%) |
|---|---|---|
| | | n = 3 |
| Sequence Name | SEQ ID NO | @10 nM |
| 8-20-A | 16 | 162.6 |
| 10-20-A | 20 | 168.2 |
| 14-20-A | 24 | 122.5 |
| 16-20-A | 26 | 177.5 |
| 70-20-A | 58 | 103.3 |
| 8-20-D | 133 | 164.6 |
| 10-20-B | 105 | 179.7 |
| 14-20-B | 110 | 146.4 |
| 15-25-A | 86 | 155.8 |
| 15-16-A | 94 | 173.8 |
| 16-20-B | 114 | 169.5 |

### <<Evaluation of the Cytotoxicity of Single-Stranded Antisense Oligonucleotides>>

[0280] HepG2 cells, a cell strain derived from human liver cancer, were cultured in a growth medium under conditions of 37° C. and 5% CO₂. The growth medium used had the following composition.

### Composition of Growth Medium Used for the Evaluation of Cytotoxicity

[0281] 10% FBS: manufactured by Gibco, CAT #10270-106
[0282] Minimum Essential Medium (containing L-glutamine and phenol red) (manufactured by Gibco, CAT #11095-080)

[0283] The day before the experiment, the cells were seeded in a 96-well plate (1.5×104 cells/well). The seeded cells were cultured overnight under conditions of 37° C. and 5% CO₂, and then transfected by lipofection with a single-stranded antisense oligonucleotide diluted in PBS (final concentration: 3 to 30 nM). After the addition, the cells were cultured for 24 hours under conditions of 37° C. and 5% CO2. Cells transfected with PBS without single-stranded antisense oligonucleotide therein were used as a negative control group. Thereafter, a Caspase-Glo 3/7 Assay System (manufactured by Promega Corporation, Cat #G8093) was added to the growth medium, and the caspase activity was evaluated. Table 6 shows the caspase activities of different single-stranded antisense oligonucleotides as determined by the method described above.

TABLE 6

| | | Caspase | Caspase | Caspase |
|---|---|---|---|---|
| | | Activity | Activity | Activity |
| Sequence | SEQ | (%) n = 3 | (%) n = 3 | (%) n = 3 |
| Name | ID NO | @3 nM | @10 nM | @30 nM |
| 6-20-A | 14 | 101.0 | 102.5 | 113.1 |
| 7-20-A | 15 | 102.5 | 106.0 | 122.0 |
| 8-20-A | 16 | 99.3 | 105.7 | 107.3 |
| 9-20-A | 19 | 104.9 | 100.0 | 103.6 |
| 10-20-A | 20 | 99.1 | 100.8 | 112.1 |
| 12-20-A | 22 | 107.2 | 107.1 | 120.0 |
| 14-20-A | 24 | 103.8 | 110.0 | 119.2 |
| 29-20-A | 39 | 97.6 | 103.4 | 99.8 |
| 6-20-B | 129 | 99.7 | 97.9 | 110.8 |
| 7-20-B | 131 | 97.1 | 100.2 | 106.8 |
| 8-20-D | 133 | 99.0 | 106.9 | 111.8 |
| 9-20-B | 135 | 110.4 | 110.2 | 117.9 |
| 10-20-B | 105 | 98.8 | 107.7 | 109.5 |
| 12-20-B | 108 | 101.5 | 100.2 | 112.9 |
| 14-20-B | 110 | 101.3 | 107.0 | 111.0 |
| 15-20-B | 112 | 99.5 | 110.1 | 111.0 |
| 15-19-A | 91 | 99.7 | 104.3 | 106.6 |
| 15-16-A | 94 | 98.8 | 97.5 | 103.8 |
| 19-20-B | 119 | 106.4 | 104.5 | 106.3 |
| 21-20-B | 120 | 105.4 | 109.6 | 109.6 |
| 29-20-B | 122 | 102.3 | 100.6 | 101.8 |
| 30-20-B | 123 | 102.0 | 105.3 | 103.2 |
| 31-20-B | 124 | 105.5 | 104.5 | 114.0 |
| 34-20-B | 125 | 102.0 | 104.9 | 116.3 |
| 46-20-B | 127 | 96.6 | 96.9 | 98.8 |

[0284] While embodiments and Examples of the present invention have been thus described as above, combining any of the configurations of the embodiments and Examples as appropriate has been originally contemplated, too.

[0285] The embodiments and Examples disclosed herein are exemplary in all aspects, and should be regarded as being non-limiting. The scope of the present invention is shown not by the embodiments and Examples described above but by claims, and intended to include all modifications within a meaning and scope equivalent to those of claims.

1. An oligonucleotide that expresses a functional human WRN protein against a skip mutation in a 26th or 28th exon of a human WRN gene, or a pharmaceutically acceptable salt thereof, wherein
one nucleotide is bound to another via a phosphate group and/or modified phosphate group in the oligonucleotide,
the oligonucleotide contains a modified nucleic acid having at least one modified sugar,
the oligonucleotide is 10 to 30 mer in nucleotide length, and
the nucleotide sequence of the oligonucleotide is:
a nucleotide sequence having a sequence identity of 90% or more and 100% or less with a nucleotide sequence complementary to at least one target region having the same nucleotide length as the oligonucleotide in a nucleotide sequence set forth in SEQ ID NO: 1, SEQ ID NO: 2, SEQ ID NO: 3, SEQ ID NO: 4, SEQ ID NO: 5, or SEQ ID NO: 6;
a nucleotide sequence complementary to a nucleotide sequence formed by deleting, substituting, inserting, or adding one or several nucleotides in the target region; or
a nucleotide sequence hybridizable with an oligonucleotide having the target region under stringent conditions.

2. The oligonucleotide or a pharmaceutically acceptable salt thereof according to claim 1, wherein the nucleotide sequence of the oligonucleotide is a nucleotide sequence having a sequence identity of 95% or more and 100% or less with a nucleotide sequence complementary to at least one target region having the same nucleotide length as the oligonucleotide in a nucleotide sequence set forth in SEQ ID NO: 1, SEQ ID NO: 2, SEQ ID NO: 3, SEQ ID NO: 4, SEQ ID NO: 5, or SEQ ID NO: 6.

3. The oligonucleotide or a pharmaceutically acceptable salt thereof according to claim 1, wherein the nucleotide sequence of the oligonucleotide is a nucleotide sequence complementary to at least one target region having the same nucleotide length as the oligonucleotide in a nucleotide sequence set forth in SEQ ID NO: 1, SEQ ID NO: 2, SEQ ID NO: 3, SEQ ID NO: 4, SEQ ID NO: 5, or SEQ ID NO: 6.

4. The oligonucleotide or a pharmaceutically acceptable salt thereof according to claim 1, wherein the oligonucleotide is 15 to 25 mer in nucleotide length.

5. The oligonucleotide or a pharmaceutically acceptable salt thereof according to claim 1, wherein a sugar constituting the oligonucleotide is D-ribofuranose, and modification of a sugar is sugar modification on a hydroxy group at position 2′ of the D-ribofuranose.

6. The oligonucleotide or a pharmaceutically acceptable salt thereof according to claim 1, wherein modification of a sugar constituting the oligonucleotide is made to form a group represented by the following formula (A1): [chemical structure]
wherein Bx is a nucleobase, being independently in each occurrence a group formed from adenine, guanine, cytosine, 5-methylcytosine, thymine, or uracil; X is a phosphate bond, being independently in each occurrence a phosphodiester bond, a phosphorothioate bond, a phosphorodithioate bond, a phosphoamidate bond, a boranophosphate bond, or an alkylphosphonate bond; Y is independently in each occurrence a hydrogen atom, a hydroxy group, a fluorine atom, an optionally substituted alkoxy group having one to six carbon atoms, or an optionally substituted amino group; and Z is independently in each occurrence a hydrogen atom, or an alkyl group having one to five carbon atoms and optionally having a carbon-oxygen double bond or a cyclic structure, or a certain carbon atom in the alkyl group and Y are taken together to form a ring.

7. The oligonucleotide or a pharmaceutically acceptable salt thereof according to claim 1, wherein modification of a sugar constituting the oligonucleotide is made to form a group represented by the following formula (A2) or formula (A3): [chemical structure]
wherein Bx is a nucleobase, being independently in each occurrence a group formed from adenine, guanine, cytosine, 5-methylcytosine, thymine, or uracil; X is a phosphate bond, being independently in each occurrence a phosphodiester bond, a phosphorothioate bond, a phosphorodithioate bond, a phosphoamidate bond, a boranophosphate bond, or an alkylphosphonate bond; R⁴ is independently in each occurrence a hydrogen atom or an optionally substituted alkyl group having one to six carbon atoms; Y′ is an oxygen atom or an optionally substituted nitrogen atom; R⁵ and R⁶ are each independently in each occurrence a hydrogen atom or an optionally substituted alkyl group having one to six carbon atoms, or R⁵ and R⁶ are taken together to form a carbonyl group or a ring; and n is 0 or 1.

8. The oligonucleotide or a pharmaceutically acceptable salt thereof according to claim 7, wherein modification of a sugar constituting the oligonucleotide is made to form a group represented by the formula (A2), and the R⁴ is independently in each occurrence a methyl group, a methoxyethyl group, or an N-methylpropanamide group.

9. The oligonucleotide or a pharmaceutically acceptable salt thereof according to claim 7, wherein modification of a sugar constituting the oligonucleotide is made to form a group represented by the formula (A3), the Y′ is an oxygen atom, or a nitrogen atom optionally substituted with a hydrogen atom, a methyl group, a methoxyethyl group, or an N-methylpropanamide group, the R⁵ and R⁶ are each independently in each occurrence a hydrogen atom or an alkyl group having one or two carbon atoms, or the R⁵ and R⁶ are taken together to form a carbonyl group or a ring having three to six carbon atoms, and n is 0 or 1.

10. The oligonucleotide or a pharmaceutically acceptable salt thereof according to claim 1, wherein at least one internucleotide bond in the oligonucleotide is a phosphorothioate bond.

11. The oligonucleotide or a pharmaceutically acceptable salt thereof according to claim 1, wherein at least one internucleotide bond in the oligonucleotide is a phosphodiester bond.

12. The oligonucleotide or a pharmaceutically acceptable salt thereof according to claim 1, wherein an internucleotide bond in the oligonucleotide is a phosphodiester bond or a phosphorothioate bond.

13. The oligonucleotide or a pharmaceutically acceptable salt thereof according to claim 1, wherein the nucleotide sequence of the oligonucleotide is such that the oligonucleotide is composed of a morpholino nucleic acid represented by a formula (A4) below, and is a morpholino oligonucleic acid having a nucleotide sequence complementary to at least one target region having the same nucleotide length as the oligonucleotide in a nucleotide sequence set forth in SEQ ID NO: 1, SEQ ID NO: 2, SEQ ID NO: 3, SEQ ID NO: 4, SEQ ID NO: 5, or SEQ ID NO: 6: [chemical structure]
wherein Bx is a nucleobase, being independently in each occurrence a group formed from adenine, guanine, cytosine, 5-methylcytosine, thymine, or uracil; and X′ is a phosphate bond, being independently in each occurrence a phosphorodiamidate bond, a phosphorodiamidothioate bond, or a phosphorodiamidodithioate bond.

14. The oligonucleotide or a pharmaceutically acceptable salt thereof according to claim 1, wherein the nucleotide sequence of the oligonucleotide is:
a nucleotide sequence having a sequence identity of 90% or more and 100% or less with a nucleotide sequence complementary to a target region composed of continuous 15 to 25 mer starting from a nucleotide at any of positions 1 to 40, 46, 51, 56, and 62 to 63 counted from a 5′ end in a nucleotide sequence set forth in SEQ ID NO: 1 or a target region composed of continuous 15 to 25 mer starting from a nucleotide at any of positions 108873, 108878 to 108917, 108923, 108928, 108933, and 108939 to 108940 counted from a 5′ end in a nucleotide sequence set forth in SEQ ID NO: 2;
a nucleotide sequence complementary to a nucleotide sequence formed by deleting, substituting, inserting, or adding one or several nucleotides in the target region; or
a nucleotide sequence hybridizable with an oligonucleotide having the target region under stringent conditions.

15. The oligonucleotide or a pharmaceutically acceptable salt thereof according to claim 1, wherein the nucleotide sequence of the oligonucleotide is a nucleotide sequence having a sequence identity of 90% or more and 100% or less with a nucleotide sequence complementary to a target region composed of continuous 15 to 25 mer starting from a nucleotide at any of positions 1 to 32, 34 to 40, 46, 51, and 62 to 63 counted from a 5′ end in a nucleotide sequence set forth in SEQ ID NO: 1 or a target region composed of continuous 15 to 25 mer starting from a nucleotide at any of positions 108878 to 108909, 108911 to 108917, 108923, 108928, and 108939 to 108940 counted from 5′ end in a nucleotide sequence set forth in SEQ ID NO: 2.

16. The oligonucleotide or a pharmaceutically acceptable salt thereof according to claim 1, wherein the nucleotide sequence of the oligonucleotide is a nucleotide sequence having a sequence identity of 90% or more and 100% or less with a nucleotide sequence complementary to a target region composed of continuous 15 to 25 mer starting from a nucleotide at any of positions 1, 3, 5 to 12, 14 to 19, 21, 25, 29, 30, 31, 34, 46, and 51 counted from a 5′ end in a nucleotide sequence set forth in SEQ ID NO: 1 or a target region composed of continuous 15 to 25 mer starting from a nucleotide at any of positions 108878, 108880, 108882 to 108889, 108891 to 108896, 108898, 108902, 108906 to 108908, 108911, 108923, and 108928 counted from a 5′ end in a nucleotide sequence set forth in SEQ ID NO: 2.

17. The oligonucleotide or a pharmaceutically acceptable salt thereof according to claim 1, wherein the nucleotide sequence of the oligonucleotide is one nucleotide sequence selected from the group consisting of nucleotide sequences set forth in SEQ ID NOs: 9 to 14, 16 to 26, 28 to 39, 41 to 42, 44 to 50, 52, 55 to 56, 69, 73, 80 to 105, 107 to 108, 110, 112, 114, 116, 118 to 131, 133, and 135.

18. The oligonucleotide or a pharmaceutically acceptable salt thereof according to claim 1, wherein the oligonucleotide is one oligonucleotide selected from the group consisting of 6-20-A, 8-20-A, 8-20-B, 8-20-C, 9-20-A, 10-20-A, 12-20-A, 14-20-A, 16-20-A, 17-20-A, 18-20-A, 19-20-A, 15-25-A, 10-17-A, 10-20-B, 12-20-B, 14-20-B, 15-20-B, 16-20-B, 19-20-B, 31-20-B, 34-20-B, 6-20-B, 7-20-B, 8-20-D, and 9-20-B as sequence names shown in Table 2-1 to Table 2-7.

19. The oligonucleotide or a pharmaceutically acceptable salt thereof according to claim 1, wherein the oligonucleotide is a single-stranded antisense oligonucleotide.

20. A double-stranded antisense oligonucleotide comprising the oligonucleotide according to claim 19 and a second-strand oligonucleotide hybridizing with the single-stranded antisense oligonucleotide, or a pharmaceutically acceptable salt thereof, wherein
the nucleotide sequence of the second-strand oligonucleotide is a nucleotide sequence having a sequence identity of 90% or more and 100% or less with a nucleotide sequence complementary to the nucleotide sequence of the single-stranded antisense oligonucleotide.

21. An oligonucleotide complex or a pharmaceutically acceptable salt thereof, the oligonucleotide complex comprising:
the oligonucleotide or a pharmaceutically acceptable salt thereof according to claim 1; and
an additive substance bound to the oligonucleotide directly or via a linker bond, wherein
the additive substance is selected from the group consisting of polyethylene glycol, a peptide, an alkyl chain, a ligand compound, an antibody, a protein, and a sugar chain, and
the linker bond is independently in each occurrence a phosphodiester bond, a phosphorothioate bond, a phosphorodithioate bond, a phosphoamidate bond, a boranophosphate bond, an alkylphosphonate bond, a phosphorodiamidate bond, a phosphorodiamidothioate bond, or a phosphorodiamidodithioate bond.

22. A pharmaceutical product comprising the oligonucleotide or a pharmaceutically acceptable salt thereof according to claim 1 as an active ingredient.

23. A skipping agent for a 27th exon of a human WRN gene, the skipping agent comprising the oligonucleotide or a pharmaceutically acceptable salt thereof according to claim 1 as an active ingredient.

24. A functional WRN recovery agent that possesses a nuclear localization signal by virtue of skipping of a 27th exon of a human WRN gene, the functional WRN recovery agent comprising the oligonucleotide or a pharmaceutically acceptable salt thereof according to claim 1 as an active ingredient.

25. A therapeutic agent for Werner's syndrome, the therapeutic agent comprising the oligonucleotide or a pharmaceutically acceptable salt thereof according to claim 1 as an active ingredient.

26. A prophylactic agent for Werner's syndrome, the prophylactic agent comprising the oligonucleotide or a pharmaceutically acceptable salt thereof according to claim 1 as an active ingredient.

27. A method for treating or preventing Werner's syndrome, the method comprising administering the oligonucleotide or a pharmaceutically acceptable salt thereof according to claim 1 to an individual.

28. The oligonucleotide or a pharmaceutically acceptable salt thereof according to claim 1 for use in treating or preventing Werner syndrome.

29. The oligonucleotide or a pharmaceutically acceptable salt thereof according to claim 1 for use in producing a therapeutic agent or prophylactic agent for Werner syndrome.

The application's sequence listing, which the Patent Office published only in electronic form, follows.

SEQUENCE LISTING (236 sequences)

SEQ ID NO: 1 - DNA, 76 bp, Artificial Sequence
  WRN Exon27
ttcgaaaactgtatcttcgggcaccaaagagcattgttataatcaagtaccagttgaattaagtacagagaagaag

SEQ ID NO: 2 - DNA, 142390 bp, Homo sapiens
  gene (1)..(142390): Healthy person WRN
gcaggaacgggggcggggacggcgctggaggggcgggtcgggtaggtctcccggagctgatgtgtactgtgtgcgccggggaggcgccggcttgtactcggcagcgcgggaataaagtttgctgatttggtgtctagcctggatgcctgggttgcaggccctgcttgtggtggcgctccacagtcatccggctgaagaagacctgttggactggatcttctcggggtaaagtgtcttcctattcccgttttcccagctccgtgccccggggtatctatagtgctaggcttctgagacacgtggaggcgcttaggcccgcggagcaggcccctgggctgtgtttgggagattctggaaaaacagactttctcccttttcctttcccctctggagcagctgggaaaggcgtctctcggagcttccgccattcagaaagtgtttccccgcccctgacggccccagcttgatgtttaccttgcgcgcttagttaggattgctctttctagtacggcctttattatggcagaaattgagccactacaggtctgcacagcaaagtcgagggaaataacctgctgtctatgatttagcaagtgatgatggatatttttgagttcaaatcactcagtctttaatggattttcttttctttttttcctagttgaatctcagttgttctcaggctaggtttgatatgaaaaatactactccctattgaagagggtaatataattcttaggatgctaatacaggagtctgtaagtcggagtacttcaggctttttatggttcggtacatttctttttaggggtgggatattgggataagtaggacagttcagatcttgatgtcattgaatagtggtgtctacctaaaaggaagaggctggggcacaaaattataatttaaagtgtttacttcagccaaaatgaggacagctgcccaggactcatttcccagttgccttggggagtgctccttcagccttggttacaagcaggtttttaaaggcgaaggggaagagtgggctgagacaaagttggtcaggaattgttattggtttacagagataccattgcttagtgattggctgtacactgtaactcatagggtatgagttatcgtgtccagcatatggcattttatggcttcttggttccagtctagagcccatatagcaggtgggctttaagagataattatccagctcagaccgggagtgagacgggactgttttttcattctaatgcctctctgggcctgataatttaaaggggcttgcattcttcagctaaaattttattttcttttattttttttcccccacagtggtctccctttattaatccaacaaatgtttattaaggactgctctaggcactagagataccaacaatgaacaaaacagacaaacatctctctccttttggagcttacattttagtggaaagagacaggcaaaaagtaaaattataggatgacagaaggtgaaaatagagattaaaaaggaaagggggatgaagagtgtgtgtgtgtgttgtgggtggggggctgtagggagctgcagttttacaataagtggtcagggacgtcctcgctgagaagggaatttttgagtccagagctcaaggaagtgagagaacttaccttgacgttctctggaggagaagaaagtacaaaggccctgggggaacctgcctctttatgttcagagagcaacttaagaggcctagtgagctggagcagagcggagaggaggtcagaggtcaggccagaaagggaaaggggccagaatgtgtaggactttatgggctatattgaaaattggggctttcattctgagggagatgggaagctgttggagagttgttagggaaacgtgatctgaattatgtttctaaaaaattggagtaagatatcataaaatttgccatcttagtcttttttgtatctggccaattccactcagaattcttttttaaacagctttattgagatataattaatatatcatatgattcactcatttaaagtgtgcaatacaatggtttttagtttgtcttcagagttgtacaacctttatcacaattacctttaggactttttcattacccaaaagagaatctccataaccattagtactcaatcccacccgctttcctagcaatcacttacctatttttttgtctctatatagctctcaaaccctatgatattccttctatctaactgtatttttgtactcattaacagcctctcttcattcccaccacccatccatcccagcctctggtaatcaccattctacttactacctcaatgacatcaaattttttagctcccacatataagtgagaacatgcgatatttgtctttccctgcctggtttatttcacttaacagaatgtcttccagttccattcatgttgctgcaaatgacaggatttcattctttattatggcttaatactattccattgtatatgtatatcacattttctttatccactcatctgttgatggacagttagcttgattccatattctggctattgttgaatagtgctgcaggaaacatggaagtgcagatagctctttgacatactgatttcatttcccttgaatatataccctgtagtggatttgctggacccgcttgtagttctacatttaatattttgagttatttccataatgttagtaataatttacattcccaccaacagcgaggaaggagttcccttttctccacatcctcgccaacacttatcttttgtctttttggtaatagccattctaacaggtgtgaggtgatatctcattgtgattttgatttacatttccctgatggttattgatgagcaatgtttcatatacttgttggttatttgtatatctccttttgagaaatgtctattcaggtcttttgctcattttttaaatatggttttttaatttttttatttttttgctattgagttgtttgacatccttaaacattttggaaattaacctcttattagatgtatagtttgcaaatattttatccgattctgtagattctgtcttcagtctgttgaatttgctgtgcagagaagcattttattttgatgtaatccctttgtctatttttgcttttgttacctttgcttttgaagtcatatccaaaaaatcattgcccagatcagcagtccccaacctttttggtaccaaggactggtttcatcgaagacaatttttccatccacaggagggaggggatggtttcaggatatttcaagcgcattacatttattgtgcactttgtttctattattattacattgtaatatatagtgaaataattatacaattcaccataatgtagaatcactgggagccctgagcttgttttcctgaaacttgagggtcctatctgggagtgatgggagacagtgacagttcataaggcattaggttcttctaaggagcatacaacctagatcccttgcatgcgcaattcacagtaggttttgcgctgctatgagaatctaatgccaccgttgatgtgtcaggaggtggagctcaggtggtaacgtgaggaatggggagcagctgtaaagaaaaatgaagcttcgcttgcttgcctgctgctcacctactgctttgtggcctggttcctaacaggccatggactggtactaatctgtggccctggggttgggaacctctagccctgaccaatgttagggagcttttttcctgtgttttcttcaagtggtttcatggtttggggtcttacatttaagtctttagtccattttgagttgatgctgtatgtggtgagagataattgactactttcattcttttgcatatggttatcagttttcccaacaccgtttattgaagagcctgacctttccccattgtgggttcttggctcttttgtcaaaaatcagttggctataaatatgtggttttatttcttgggtctctgttctgttctattatctgtgtgtctctttatgccagtaccgtgctgttttaattactagagtttagtatattttgaagtcaggtagtgtgatgcccctagctttgttcttttagctcaacattgctttggctattcagagtcttttgtgaggataatgttttcaaggttcacccatgttgtggcatgtatcagaactcgatttctttttatggctgaataatattccatttgtttatattatatatatgccatatttatttattcatatgttgatggacacttaggttgtttccaccttttggctattgtgaataatgctgttattaacattggtgtacaagaatctgtttgagttcctattttcaattcttttgggaatatacctacgtgtggacttactagatcacatggtaagcttttagtttagctttttaaggaactgctaaaactgtttttccatgggagcagtgtacaagtgttccagttctccatatgctcaccaaaacttaatttccttttttaaaaattatagctatcctagtaggtggtgggaagtggtatcttactgtggttttattttgtatttctttaatgactaatgatgttgagcatcttttaatgtgcttattggccattatatgtcttctttgggaactgtctattaagtcctttgcccattttttaattgagtttttttttctgttgaattgtgggagatctttatatattctgaatattaaacccttattgggtgtatgatttgcaaataatttctcccattttgtgggttttcttcactttttgatattgttctttgattcacttttaaatttttatagagtccagtttatctgttttttcttttattacctatgcttttggcatcatacctaattcccaaatccaatgccatgaagattttctgttatgttttcttttaatagttttatagttttactttttctattggagttttaagtaaattcttgtatattagtgtgatacattttaagttatttttgtatatggtgtgaggtaggggtccaacttcactcttttccatatggagatccagttgtcccagcaccacatgtttaagagtctattctttccccactgaatggacttggcacccttgtcaaaaatcaattggtggtaaatgtatggatttactcctggaatctcaattctattctattgtatttatatttctgtccttatgcctgtaccacactgttttgattacagtagctttgtagtaagtttagaaattgggaaacatgagtcctccaactttgttcttcttttcaagattattttggctatttggggtcccttgcaattctgatgagtttgaggatcaccttttccatttctgcagaaaagccttttgatagggattgcattgaatctgtagataactttgggtagtattgacatcttaacaatattaagtctttctatgcataaacatgggatatctttccatttatttgtgttttctttaatttctttcagcagcattctgtagttttcagagtacacgtttttcacctccttggttaaatttattccttggtattttattcttttagctgctattgtaaatgcagttactttcttagtttcctttcagattgttcatttctggtgtataacaacagctgatatttcaacgttgatgttgtactctgaaactttgttgaatttacttattagatctagtagctttctttgagatttttatatgggattatgtcatctgtatatagagatagttttacttcttcctttccattatggatgccttttatttcttttccatgtctaatttctctggctagaactttcaatatgatgttgaaaagcagtggtgaaagtgggtatctttgtcttgcttcctatcttaggtggaaagctttcagtctttcaccattaagtatggtgttagctgtgggttttcataaatgccctttatcatgttgaggaaatacccttttattcctagttttctgagtttttatcatgaaagggtgttggattttgtcaaatgccttttctgtgtcaattgaaatgatcatgtatttttcctcccttatcttaatgtaatgtgttatattgattaattttcttatgttgaaccacccttgcctttctggggtaaatttcagtcacttatgttatatagtcctttaaattgtgttatcttataacagaatcactctgctactgttttgagcataggccatagggaaaagcaggtaaaaggtaatatggcttgaaccaacattgtagcagcggaagtggtgagaggaggtcgaattttggctttgttttgaagatagaaccaacagtatttgctgacagattagatgcagaatgtgaaaggaggagatgagtcaggatgaatccaaggcttttggcatgagcaaccagaaagatgaaggtgacttactaagatgggaaatatacaaaaggagcagtttggggaaactttatatctattgagtggaatatgccaattagagattcaaatatccagtaaataattggctatcaaagtttgaagttaagaggaatggtctaggctgtttatataactttggaagtcattagtgtataacagctaatttaaaagccagcagactctaagggagtgagtgtagagggagaagagtagaggtctgtgacttgaatcctggaatgctgtgatgtttagagattggggaggtaagaaggagcagcagagtatactgaaaagggattgttatactgaaaagggattgatatagatggagactcaagaattatcacagaaacctgataaaatgtttcaagaagatgggtgtgattaattgtgtcacttactgccggtacattgactcagatgagcgttgagaattggctataggatttgacaacataaaagtcattggaaaccttgacatgagcccttttcgtggagtggagtggttacagtgggtttaagagaggattaaaggagtggaaacagagatgctattatagatgactcgtttgagtagttttcctacaaaggggagaataataatggagcagttagccaaaagttgagtttttttttcttcttcttttttttagttggaaaaaattgcgtatatgttgatgggtcttttctggcagaccagtagagaggaaaaagttgatgatgtaggagatgggaaaatgtctttgagtagatgtcttcgagaaaatgtctttgagtagatgagaggtttgcacacatggagaggttggatgtaggagtactgatagttcatccatagttacataagaaaaggtagatgtattagagttctcctgagaaacagaaccaatgggagatctttatatctctgtgtccatctctatctgtatttctgtctctgtatctatgaagagattataaaagttttaagatctgccaggagacatacccacgggagctaatggtatagttccaggccagttgtgaaggcctgagaaccaggagagcctatggtgtaagttccagtctgagtccaagtctgaaggcaggagaagaccaatgtcccagctcaaagacaggcagagggagcagatcttcccttacttagcctttttatttattcaggccttcaacaaattgaaggcccacccacattagggagggcaatctgctttactcagtctactgaatcaaatgttagtctcacccagaaacatcctcacagacacacccagaataatggttagccaaatatctgggcaccccatggcccactcaaattgacacataaaattaaccaccacagtagagtatatgggtacaaatataattatgtgatatagatttcagggtaagagcctgtggaaattcatttttgattgcttctagtgaaatcggaagcaagatcatcagctaagagtgacgatcggtggaggagatatgaagtttaagtggagaggagaaggtataaaatagtcttaggaggggaggatagtaaatagattagggaaaagttgtaggattgccaggaagtagtaagggcccacttgaggctggtggtcacaaatttaaggtgagaccagtcaaaatggttgtgcttttcacctgctgcattcattcagctgcataggtacaggcacagagtaggtcaagagttcttttttattcggggttagagttttgccaggagatagtaataaagccagaagggcaatgaatttgagggagtatgcaaggaagtggctgttaacttggagtttaaactagtcaagaagagaattaaggactgcccaaggggtgaggacaatgatatggtagcagggcccttaaaagccccagttagatgaaaagattgttggaattgagtttctagagggaatgaacttgaaaaacaggaggtgttggttggagagtgggatatatggaattgagattatggaaggattcagtcgttggtaataacatagtatctttgtaggaataaataggtggagcaggatgcagacaagatcactggaggagggctggtcagaagactgggaggcactatctcccttggatattatacatcaaagcttgtgatctactagacaagtagtggggaaagggtaggatatagatattaatggctatagttttgatggtgatggtcatggtgatgatgatggtccattaacactcaactcaaataccatcaatttgatttatatctaacaccacaaagttaggtgttgagttacatgtggttatattgtaactaatagtcagcccttcatggacttctattctttgatgagactcttcttgtaggagtagtaggtgccttaaagcaccttttcatagttgtcagattgaaatccttcaccagtgttttaggttaaccctgttactgtggaagtttctcttggctttctgtgtgggctgcttctttgtctagttttaccttttggggttagcatactattgtgaataatttattggtgagaaggtaagcagagaagtagagtactctatgacctagtaatttcatatctaggaatctatcctatagaaatgataggaatgccttacaatacccacatatccacaagggtattcattgaacgttatttttggtgaaattcgcaagcaacctaattatcatcaatagggaattgttaaattatgatagataaaatggaattctattcagtcttcaaaaagtcagatcaagaagtggtcttacattttaattatcccatcctgtcaacaagagtgtcttcagttgcaagtaatggaaaaaccattcaaactgacttcagcaataaaaggttatttattggtctgtttcatggagacatctgaggtagagtggccttcaggcaagttcactcagggatccgactatttttctggccttattcttggccctcttctatgaaaacaccttcagggtggtttcttgtatgcttgtaagatggctacttgcatcaaccatgaccacatctagcaggagcaaaagcatcctttcccgtaccagaggagagtcccgaaatttgttgcaattggactgccttggaagcaataattatggccaggagatggaggctagagaactgagacctgatcatagctcctatccttgaatcagttgtatagcaaggggaattggattttccttaagacagttggatttcacctgtagtcttggtgatgaggtcagttccatccataaaactttgctgttacacattttgggatggggtgaggagggctgaatggagattaggatgctattgaaatttgctgtacacaatggatcattatcgtcttctttcttagtgttaaggtaatcagcctctttttcctcctcctatgcttgactttactaaaaccatgagacatgtttaacctcaggactccaatttgaaaaaatatagactgttatttactttattacttacagaagcccttcatactactctcagcaagaaagaggtaggcagggagtgagggaggggggatcatgcttactgagaaacaaactatcgagtattgaaactcccccttcatatgcctgacctcagtcccattcagttaccagtaggggcccctattaattggtacctcaccagcttttgctgttcgttcataaaactgagtcattgaagtacagtagaaaaataattggactacaagataacttatttccttccataattgcaaaatatctgatttttcttcttgtttgtattatgtaaacttaccctgtctgagggtcctcctggattgttctttgcatttatatatacatagaatttcattttcttttttcttgttttttttttagacggagtctcactctgtcgcccaggctggagtgcagtggcacaatctcggctcactgcaagctccgcctcccaggttcacgccattctcctgcctcagcctccccagcagctgggactacaggtgcacgccgccacacccggctaattttttgtgtttttagtagagacggggtttcaccatgatagccaggatggtctcaatctcctgaccttgttatctgcccgccttggcttcccaaagtgctaggattacaggcgtgagccgcttgcccgaccttcttttttttttttttttttttttttgagacgttgagatagagtctcactctgttgcccaggctggagtgcaatggcacgttttcagctcactgcaacctccacctcccaggttcaagcgattctcctgcctcagcctcctgagtagctgggattacaggcgcccgccaccatgctctgctaatttttgtatttttattagagatggggttttaccatggtggtcaggctggtctcgaactcttgactacgtgatccgcctgcctcggcctcccaaagttctgggattataggcgtgagccactgtgcccggccaatttcattttctattttgaaatttaaactaccactgacacttcgttttccctctgttttacttagcatttatcttagagaataatcttaatatgtatagttctattttattcttttactggcagcttagtatgccatattttggatgtgtcattgtttatttacctattaatttaccctataactgcttcccatatttttgcttttacaaagggatgtaatgaacatcctttacatacgtctttgtgcatatgtgcaaatatttccataggatagatgtaattactgacttgaaggttatgcagatttaaaattttgatgccttctatgaaacatctttcaaaatggtgatgccagtttcttctctcgtaattactgcatatggtcaatcttttaaatttttgctggtaatgatatttcaaaattataaccagttttttggcctcatttcttgaataacttgttttttctcaaagataagaaatgtctccttcatcgtatgtcaaatttccatatttacatggatctatttctggacatggcaagttttatttatttattgtatgtatttacggtgtacaacatgatgttttgatacacatatacgtagtgaaatgattcctacagtcaaacaaattaacatgttcaccaccttccatagtctctgcagtcttcaaggttttctctatatgggattagacatgctatgtctgatctgtttttgtatttttacaccaattccacactaattttttttttttttttgactgggagtctcgttcttattgcccaggctggagtgcaatggcatgatctctgctcactgcaacctccgcctcccaggttcaagcaattctcctgcctcagcctccctagtagatgggattacagcactcgctgccacacctggctaatttttgtatttttagtagagatggggtttcaccatgttggccaggctggtctcgaactcctgacctcaggtgatctgcccgcctcggcctccgaaagtgctgggattacaggtgtgagccacctcacctggcacacactattttaattactgtagttttaaaagtttcatatttagtagggtgagtttttccttgttggtcttgtttttcaaaaaaaatttgctgctcttgagtattttctcttcccagtgaactttaatgtaaactcacgtggttcaatgaaaaattctgatgactttttttcttggtattgcttcttgagtgtattgatttaattaatatatttacagttttgggtctggctgtgccgaaacgcagtgtgtcttatccagtccttttttaactgtcttaataaaatttgctggttatctttaaaatggatcttgtatattttatgttaggtttattcccaggcaggttgtcatttttgctgttactgattttggatataaattttggatataattgtataatttggacttggatataattgtatttgattctgtcttatatataaaaatgagataggataataatttatcctaggataaaaataatttgagtatccttattttgcatctggtaccttacttgctcctgttaaacaaatagataaaattacttgtcttcaaagagatcctgtggaaaaattatttattttaggagactttggagctttgataaaaattaggcttatcttttgtaaaagctggttagtgatagcaatcagactcttttaaaggtgatttttttttctttcctttgataaaatgcttaatatgagggaggattaagaaagaggatggcttttgaacagtttcttcatggggaaataagaaattagaataatttcatgttctccaaaaaaaggagaaaaatgaccttccctcctgagcctacttcaagcctctgtttctttctgactctattgttctcatctctgcatttttccaatctcttctactgttagtgttttaggctagctcctcagtggagggcagaaattcaccttctctttagctgtctttgaaaccaagaagatagaggtatgagatcttcgtagtctgtagtaagaataatagaagccatcagaaaaaaatatcaaagctttgtagctgctcctggaagttttgatgtgaagcaggagacatcacctattggtacctgacttgcttttgctgttcattcataaaacagagtctctgaaatacagtagaaaaataattagactggaggataacttttttccttccaggaattacacaatcacaaaattgctgatttttcttcttattcatgttacataaacttatcctgtccgaaaagactgtatttgaacttactatgtaagatttgctttaggtaaatttatggctgcttccagaattgtgtattaattttccagtttcttttttaccagtctccacttttacctttccctcttccccctatacttaaattggtcttactgtaaaatttatgcgtttctctttctacctggcaatgctgattttttttttttttttttttttgaggcaaggtctcactctttcacccaggctatagtgcagtggcaagatcgtggctcactgcaacctcgaatccctgggctcaagcgatcctcccacctcagtctcccaagtagctgggactacagatgtgtgccatcgcacctggctcatttttgtattttttgtagagatagtattcgccatgttgcctaggctggactcaagccagcctcctgccttagcctcccaaagtgctgggattgctggcacgtaccactacatccagccagggctgagtttctgaatcatcattgcagcaagagaaattggattacctttagaccactggctctactgtgggctgggagtgggacaccttccttaaagcgcattggacattggctttgtgggtaactgatctttacctgaatgaaatttatcagtactgtattaagggtctagggtggaacggatgctagcaaggcaaccgttaacatccacttactgatgaatcctataaaattttatttcaggccatacgaagtaacagtaataaatataaaaggaaaaatagacaacctaagcaactttttaaattgacttacttgaaaactttccctgcaatttcccggtttataatggttgatttcagctgactggctatagctacttagagaacagaggaaattcattaaaaataatgaattattcagttgggtagtgaaatccagttataaagcacttcgctgtgccatggattcagttcaggtcaagtgatgttcctggtttatgggcagtgtggcttctcactatgacacagcaaagaacgtagcttttatcctttacccttgttactaactaaaattaatggcattttattgtgtttatttgtttgattccatttacagtttatttcacttggttttattagtacaaaattgtgctttatataatatttgacagttaggaaaaattgttagatacctataaagaaacaagtctctcaaaaatcatcctactacttttaaaaattacatcgtcttactacagttaacctagatgtgaatgggtagttttatttagcttttctggtttgtttgcttggtctgtttggagggaagttaagattagcagaaatgtagtaatagattcatgaaagtcttgaaagcttctttaattagagaatttaatgagggctttggcatgcattctttggtttttctctgttttcctctaccccttcttattctttttggttcattgaaaagtagaaagaaattctcaaaaaccgtacaggagaataccttataaatgatatcttctgcaataaactatagattgtatatatgtatatgtatctagatacacaatctgtgtgtgtgtatatatatgcttgtgtgtgtataaatgtataaattagttactagtatatacgtaagtataaaacctcaatgtgcaaggttacattttcagaaaatatgtaatataataaaagaaatcaagcccagaatttttaaaaagtttattgcgctttctgttaaaaatgaaaggctttttgactggaagctgcttctcagtaaaaataacataattgtgttggtgaagcccaaagattctaatgaaaattagggtattgacaaccaaacggaattgctggagtacttaagctgctttggttttgtaatctttctgtgtcagaatatttgaaaaacacttattaatccagtcttgtaacttatccttgaaatctcttttttaatattcttttccacacacatgaaaagttagatgagtgtatgaatttctgttgtcagactagttgtaaacctcctaaatatagtttctgcagtatagttaaagagaaagaacatcctggctaacacggtgaaaccctgtctctactaaaaaaaaaatacagaaaatgagccgggcatggtggtgggtgcctgtagtcccagctactccggaggctgaggcaggagaatggcgtgaactcaggaggcagagcttgcagtgagccgagatcacgccattgcactccagcctgggcgacagtgcgagactctgtctcaaaaaaaaaaaaaaaaaaaaaaaaaaagaaagaaaataggcccagcaaggtagctcacgcctgtaatctcagcacattgggaggctgaggtagggaggattgcttgaggccaggagttcaagaccagcctgggcaacatggtgaaactccatttctacaaaaaatacaaaaattagctgggcatggtggcatgtgcctgtagtcccagctacttgggaggctgagtgggaggattgcttaagcctggggaggttgaggctgcagtgagctgtgactgagcaacagagctagactctgtctcaaaaaaaaaaaaaaaagagatgggttttgaaattcagtactttttttgagtgaggtccaatgggtcagaaagaagcattggataaatgaatccattttctcttctctgtttgaatttgtaatttgaaagaatattctacctataaagtacttcagtgcttaattagctgtcagtgaatttatatatcttatctaattcatatggatttgctatttttatctgtacctacagattcctgacctctctaaggggatcccagtatactatagggaatgaggtataatagaagtaaaagacctatcactagtcctgtcatcattccaactcatgtgtaattatagtttaaaagaagtgacatcatgtgtattgctgtttatctttacattaatcttgtggtcaagaaagcaaatactataatatataataattatataatatcataagacaagtaatataataatgggaatataatcccattttacaaatgaggaaatgaaaatttagagaaataaagtgacttgtccagggtcacatggatactaagtgaccaagtgtcaaagcagaattttccaaataacttaaagataattcttgtacaaatatagaacgaacacatgtcatatgtgttgtgttaatgagggaaccagaaggatgacaacattggttcagagagatgcaaagataaatatagacattggaggaaaaagttggaaataagattgttaggttagatacaaagctgtgttataggccaataaaaaccatagactttgaggttatcttttttactggacaggattcagttacacctttatgagaccaaaatttattatttaacatgtggatattagagtctgagttttaaaattattagtaaatgaccgtcaaataaagatatgtcccctaatgaaatactgataatcgctgggtgagcttgtgctcctatatgacattgaaatgacatactgccctctctttgtcttctaagttttggatacttttttttttttttttttgacacaaagctgcattagaacctaggtttcttgattttcagtccagatttctttccactctacttcctgcttcttcatagtataattttcaacactagagcagtctgcataacttttgcaaaatcagctagtctttcttattagttttcctttgtgcaaagtgatgtagatacagctttcttcttcagagaaacattgtgaaattcaatgaatatttgtaaaatttgcatacgtgcccaatgtgagaaattgaaattattacttaagtattgcaactgttcttttaggatattttgtttgcaaatttcagagtaattataaatattcttgcatttttattgtaatcagtatttataaaacagtgtatttcatcacattaacctttacatattttgaataaaatagtattgaaccattttaaatagtaagtggaaatttttccacattaaacagtataacgggctaacagagttaagcattgcattatttaactaataattttttcctgaacttcagattattatctgtatgtgtcatataacttgacaattttttttttttagtgctttttaaaaagagtgggatactttattcagtttagccctcaagcaattaggcaagtcagttaccatggtaacagtaggtattaatttccttacctagttagaggttttatgaacaaagaaatctctgagttcatccaccaaaacccaactttctcttgagactggcctcttgagactggtgttaaatttgtctattttctagaagatgacactattctaagtggaaaatacggttctcttgaggtgaatttctactctatcaagagtgaagtagagtatggcttaaaagttaagtgattaaaaagctaccctttcttagctaatttggaatgtaattggtcttaatttttctaaattcgttctaaccaaaatcttattggcgtgatttctattgacatgaactagaagtgacttcagcagacaacttgtcccaatatctaaatgctgtcaaatagaatcacttaagatgaatttcttccaaaacagagttcacaattttgacagataatctcttagcatttaattgactagtattaccaaccttatggaataggtccactcgtttagctatcatgaggaccattttgcaactaacttatcaaaaagccttcaccaagaagttgcatatcttattgatattttagaatgcgattatggagattaaaaatcaccacaatgggttgttaataacgccagccttgaactttcagttttagagcattttatctgtgttctgtagtcaaagttggtaaggtgtccagtgggtcatgtttgacttgctgcttgtttttgtactgtgtgctaaatggtttctacatttttcagtggttgaaaagtcaaaagaagaataatattttatgaaatttaaataaatccaggtttcagtgtctataggtaaaatttcattgtaacgttgttatgcttaagtattgtttatgacttctttgctatagtgacaaacttgagtagttttgacaaagatcatctggcctgtaaggcctagaatagttactgtctaaccctttagagaaaaaaattgctggcccttgttctatagtatgaaaaaatatagccttgattattcattaaaaaattattttcccattttattgacatacttttgtcccctgattgttaaaaggaatgcatgttcttatagaaaagttggaatatatagaaaagtataaagaacaatatgaaaaaccatttgcaattgtgagataaccactaatgttttggtatacattgctccagacttacacacaaacacacacgcgtatttattttatacaattagagtctaattttttttttgagacagtcttgctctgttgcccagggtggagtgcagtggcaagatttcagctcactgcaacctctgcctcctgggctcaagtgattcttgtgcctcagcctcttgagtaactgggattacaggcgtgcaccaccatgtccagctaatttttgtatttttagtagagacggggtttcgccatatgcccaggctggtctcgaacccctggcctcaaatcatcggcctgccttggcctcccaaagtactgggattacacacgtgagccactgcgccttaattttttaatttgcttttttcacttgaataattataagaacattatttttaatgactgtgtagtgttctgttttatggatgtaccatacttaattatttagtcataatttattattatgaggttgataaacatgataatcagattgagctcaagaagctagttatagggttgcacaattaatgaatcccaggtacctcgctgggttgctgaggctgctatttttttcctgcctgtttggaacactgtgtttgggaccaatgaggcaaaagaaattgaagagctgccattttcaattattctattagaagatacattgaagatttgtcaaatgacatagacacaacactaatccagaagattatttaatcaaaaaggcattcatttcagatatgaattcataaacatttgtaacgatcctcagtttgaagaccatatagaatccctgaagaactggaagacactatttgcttggcaaagagaagtccccagaccaactggggatgaaatattcaaagagataaatgaatactttgaaacatacaaggtactatggaaaaagagtggaagtttgggacaggtaatgacaggaagatataaaagctttacattaagttcaatctaaaactttattccaagtaacaggttgtcttattcatggagaagcagttgtaaattaaaacttgcctgtggtttggaatttcacattaaatgattacattaaaaattcaaatggtgaacctaactaaatccaagctcctacagtaccttcttttcacctttaggtgaagaaatgcggtgagctattttattactgattatgtggacagtccaaaggaaggttcataagcgaaaaggaaaaatttaaattattccatgtgagcgattcttactttgcagatttgttgaagtgtagttactggcttcaaaaagtggtatccttaactgacattttgaacacttgaattcactcaataaaaaaatgcagtgatcatgtggaaaatacattaaggtatatgacagagtttatggattcagagcaaaaattcagctttggaaaagtgaagttaaaatggttttttaagtgatgtttaattggtgttatttgaatcctaaagaagaattaatagtactagtagaggaaagtcagtgtgtctgtgacaaagctttagtattattttgaaatacttgatataaaaaagttcacgtttactcaaagcttacttaaatcatcagaataaattaacatgtttcttaattaaagaaaaggagaagctattagacttaaaaaatttttgcacccttgaaatacatacaatttgaagagattaagttgttggaatactggttaatggtgaaaaaggagttttcagtctatgaaagcaaagccttctcctttgccatttgcttttttgtagtggttgctatgtagaattcgaagaaaatattgttaaaaagtcttggtcaggagtagagtgtagcatgaacccaatgcattttaacgttaataatgaggaaaaagggaatgcatgataatttcatcaagtcagaaaaaaatggaaaaagaaaaagaggaaactgaagaaagtaactgatgaaagtaaggtgaaagggaaaacaactttttataccacctgtgaatgagattaattttcgtttccatactgaaagacaaatatattccaattaagccattcaaaataaaaaacaatttttttttggtaagagatgggatctcactatgttgaccaagttagtcttgaactcctgccctcaatcagtcctcctgcttcagcctcccaaagtgctaggatttcaggcatgagccactgtgcctggccaaaaccaaaattaagcaacaaaacaacaacaacaaaaattccagacagcctttaaaataatgataaaggttgaaaaattgtagatagtggtaggtagataagatttcaggaaaagtccaaagcaaatcataatacgttattttaaaggggggtttaaaatcctttaaaggtacaatgtgaagcattatgaaatgataaaatacatgttttttaaaaacattaattttattttaagttccaggatacatgtgcaggacgtgcaggtttgctacataggtaaatgtgtgccatggtggtttgctgcacctatcaatctgtcacctacatattaagccccgcatacattagctgtttttcctgatgctgtccctcctccaggacccagtgtgtgttgttccccatgtattctcatcgttcggctcccacttataagtgagaacatgtggtatttggttttctgttcctttgttagtttgctgaggataatggattccagttccatccatgtccctgcaaagtacatgatcgtgttcctttttatggctgcatagtattccattttatatgtaccacattttctttatctagtctatcattgatgggcatttggtttttttccatgtctttgctattgtgaatagtgctgcagtgaacatgaacatgtgtgtgcttgtatctttataataaaatgatttatattcctttgggtatatacccagtaatataattgtataacccagtaataggattgcagtgtcaaatggtatttctggttctaggtctttgaggaatcgccacactgtcttccacaatggttgaactagtttacattcccaccaacagtgtaaaagcattcctatttctccatagccttgccagcacctgttgtttcttgattttttaataaacgccattctgactggcatgagagggtatatcattgtggttttgatttgtatacaaaaaagatttgtatttctctactgatcagtgatgttgagctttttttcatgtttgatggttgcataaatgtctttttttgagaagtgtctgttcatgtcctctgcctactttttaatgggattgtttgttttttttttcttgtaaatttgtttgagttccttgtagattctggatatagacctttgtcagctggatagattgcaaaaattttctcccattctgtaggttgtctgttcactctgatttgctgtgcagaagctaaaagacatgattttagaaaaagacatgtcaaagtcatacatgctcaacgacatagcgagtacatatgtaaataaaaaattattttatgctgtgaatttgaccgaaaataacctttacctcgtcaggaattacaatcctcacgtatggtaaaggatttccctattgcaaattattccacaacattaatgttctgtgtgctttttatctatcccaagatacaagtaaatttgacaaagatattaggtttgtaaacaaatttacgttcaaatctttgcctggaagtatctagatagaattttgcatgcaaaagagtatttacatctaaaaaattacatatttcaaattaaaatgattttagtgttatagatagaaggaaagagttattgaagtttatttctgttttggcagtgtaaatgaattacttacaaaattttagaagtctacaggtgtttttataaagtttgtgttatttgtggaaacctcagttttctggcattttgccaatgaggtctactctaagtatagcagaaatttgttttccagctttataaatatatattttaagattaagaactgattttacttatataatctgggatcaacttttggcttctcctgtcaaggattttgaatttgtgacaaaatatacacttattgataaccagtgacatatataaaatgctttacaattaataaagcatatgtattttacatattttttcactacatatgacgcatgtggcaaccccaagagttgagttgtacccatcggcaaactttgatcatgattctgtgaatataggcaagcaccaattgcaggtagaacattctttttttgagtcccaaaccgtgagaaacaaattacagaaatgtacctttcttttgcattaggacacgttgtagttttgtatgaacactctagttttaagcagtatgtgcaaaaacattgcacaaaggatttgtgtgttgattttgggactcctgtattattaattatgtggtttatttgactaccccacattttcaagcataaattaataaatccataattccaggcttattaacaataaacaatctagatagttgaactctttcttgctaacattttctagatatggactgtttggtatttttctactaataaagacccttagtaagctgccttctggtttgatgtcattgggatgtttactgggaactttggtggagatcttgcagtctctctcccccagtggtgaaagaatgagttacaaaccagctttccttcccagtgtacaatagcgatggagtttgttctatatggaaaatttgtttgataaaagtattctttaaaattttttgttccataaattatcagtattttcagtttctgattcatgcttgggatagttgctgcatattgtttaattttgtcagaatttatattgttaaatatcaaatacgacagactaccctcaaatcataagtagttaatgtaattaacatcctgtttcatcatgagactcttcagtgttacattaaaaactgctacctcctgggccgggcgtggtggctcatgcctgtaatcccagcactttgggaggctgaggtgggcgatcggatcacgaggtcaggagattgagaccatcctggctaacatggtgaaaccccgtcgctactaaaacatgcaaaaaattagccgggcttggtggcgggcgcctgtagtcccagctactcaggaggctgaggcaggagaatggcatgaacccaggaggcagatcttgcagagagctgagatcgtgccactgcactccagcctgggcgacacagcaagactccgtctcaaaacaaaaaacaaaaaacaaaaaaactgctacctccttattacaaataggaactaaagttgaagtttgaggaatttgctaagaactaagccttgaactaaggctattttatttgagtatgagtcatatcagggtacggatccattttactattaacaaaacaaatatgttctgttttttttttttaaatgcacacaccacgtttgagagattcttattcactgtattttctttaattatacttgaattttggtttacattgaggagtgccctcaaagatattaacagatttttaaaaaatcctctaaaaaactcattcttagggaaatttgttcacttactaggtgaggagcaaaataaaaatccttaatatagaagagctattatctgtcttcaaaattaagtctttgagtagatttgtgaataaatctaatagttttgctgaatttacttagatcttaagacagaataatcatgtagaaaatttaaaatgtcaggaattcataatgattcatatacccaaggattttcattgatagtgaggtaaggttattcttgagaaagactcaaagtcataaaataatagaatttcgaaactaccagaattatacaagtcaattaaaatgactgatttgttttaagaggaagaaatactaaatgtataattattagatgcagcatattgtatctgttttgttttgtgattctagctcttataacctatgcttggacctaggtgtcataacttactttaaatatgtatgtttggttttcattcatattgacagtactacctctcagttttctttcagatattgttttgtatttacccatgaagacattgttttttggactctgcaaataggacatttcaaagatgagtgaaaaaaaattggaaacaactgcacagcagcggaaatgtcctgaatggatgaatgtgcagaataaaagatgtgctgtagaagaaagaaaggtatgttgttcattgactattcttttgggtgagaaatttaatttatatttgactgtgcaaagagtcagttgttacttgtaaacttcaagtcattgtttaggtcagagttgctgttgtctaaatgcaccaggacctagttgttgaaagggtaaactggaataaactttaattgggtttacaaaatgagaattcttactgtatattttctctttttcgggttgactttaccagtttgttctagttcagataatttagacaacattaactttgttgaattttttgtttgccagccggtcttcagcattttaaggcaacattattattacagttgtaatacgaatataattaccagagaaaaaactcaggaaaataaatgcttttatgaaaatgggattagaggtttgaaaataaacttgttaggagaaataatttcacaatgggatggttttttctttgttaagttttctttatgacttcattagtttataaaacattaattgataaaacttagaactataaattgaatgcttcagtgaactttattatttcagtgaacatttgttatttgatgtgaactttgtgcctgttttgaaatttactaaactcaaggcatgtgttcggaagagtgtttttgaagatgacctccccttcttagaattcactggatccattgtgtatagttacgatgctagtgattgctctttcctgtcagaagatattaggtaagtgatttgaatttcctgattttatttgaatttggacccttagaaggtactattatggtaatgtttgtgaatatactgagttttacaggtgaggtgtgttcaatagataattatttctatgtatacactatcaccaagttttacatttcaaataaaagtcactgaattaatttgtaatctgtcagtttgttcattcataagcttttctattacttcagacagtttttttttaacttttttaatatatgtgctgctgaagcgagcacgacagttttttaactttcagtacttaagatgttatatatagagctactgaacatactgtgtttattttaccaatttagggaaaaagtgcaaaaattatttaacctttaaatgcacctttatatttcattaaaaatatcaacatagtaatattgaataatggctatgatcggctctgttgtgtgtaattagtaacagttgtagcaaatgatccttaaaaaatgttctaactaaacattagaggccaggcgcggtggctcaggcctgtaatcccagcactttgtgaggccgaggcaggtggatcacaaggtcaggagattgagaccatcccggctaacatggtgaaacaccgtctctactaaaaatacaaaaaattagccaggtgtggtggcgtgcgcctgtagtctcagctactcaggaggctgaagcaggagaatcgcttgaacctgggaggcagaggttgcggtgagccaagattgcatcactgcactccagcctgggcgacagagtgaggctccgtctcaaaaaaaaaaaatccaaaaaaacaaccccacaaacaaacaaaaaacattagaaatgtctgttagtacttttaaaggttgccttgtaaaattaggactgcaatagtgcaatctaaggctctcaaagcataaaacaagtaataaggaattcattcagatattttccgaggtggttatacctgtcttttaaaaaaaaaattttgttatatattgggttaaaaaaagcagaggtgctgggcacagtggctcatgcctataacccctacactttgggaggccaaggcaggaggattgcttgagcccaggagtttgagaccagccatagtaagacccccatctctacaaaaaaatttaaaaattagccaggtgtctgtggtcccagctactcaggaggcctaggttttgggcccgagaggttgaggctgcagtgagccttgatcacaccattgcactccagcctgggcaacagggcaaaaccctgtctcaaacagacaaacaaacaaacaaaaggcagaggtaggttaagctatttattaatggtcttctactggtatagatataagctagaaataacattcaagtgtttttacttttactacagttatctggccactttgggactcattatactgaattagtttcacagaggaggtaaaatctgttgtttatgattacatattaactctaccattttaccttcagcattgctgtagtatgtcatatctgaaggcaattagcacaagtgacttgaagaattgtagttttgatgacttatatgtattttataaaaggcaggcagagtttttgtgtttgctttcccctcctctggacactttaaatttttgctaccacaggtttccaacaatttgattatgatgtgcccttgtgtaatgtggttggtgtttatttggcttggagttcgttgaatttttttgatctgtgtgggcttatacctttaatcaaatttgaaaaatgtcttcagatcctttttcctcccatcctgttattcttttctctttctgggactcttagtacacacaagtttgattgcttgatactgtgtcacaggccactgaggctctttcctttcagtcttttcttctttcttcctttttttctttctgtgcttcattttgaatagcttgaatagttttgtttcctgtcttcaagttcacttatatttttttcttctgtagtgtctggtctgtttataccatcctgtgaatttcttttttagatactacatattttgtttatctctagaagtcccatttggttcttaatttttttttccattttggctctcattattcatgtttctttcaaaattcttgaacatatttagcatatttttaatagctgttttaatgtacttgtctgttaattccattattctagggtttttttctttctattggatgatttttctcctgattatgggttatattttcctgtttattcctacagctgttaatttttttttttttaattaggcattgtgatcttactttgtggaatgttagattttattgttttcctttaaagaaaggaactttgtcagacatctaagttacctgaagatcaactttatgttttgaagcttgttttcaagcttgatcagggaaagtctacgtttgcctttagtctaaaggtaatttagccctataataagatgtgacccttctggagtctttgtagactgcctctggtgatcaacgatctcttctctgacttttcagaacgttaatgcctcttacctttgtgtaagtccgtcctaagaatcattcagcttatggttgtttgcccagccccatagagttttagtctatgcatgcttgtcttcgtattctgcaaagaccaaaggagtcccttagggagatttctggagctcttttcctgcctagcttcctcctctccagaactctgccccgtgagttccaggtccttcagcttccagggctctgaactctgtctccccaactcagtgctctccttgggattcttctccctgttctgttgtctgcaatgggtcccaggaagaatgtggggcaactgtaaggttcacccttcatttcccttcccttagagatcatagtcctgtactgcctgttgtctagtatctgaaacagttgttttatatgttttgtccaagtttagatttgtttgtggtgggagggtgagtctggcctcccttgttatatcatgttggcctgaagcagaagctgagtttcttttattttttaaatatagtttcaatttttaacaactattaaataggcaagtatcaacaacaatagataacaatataatagatatgcatattcctcccactttatcaaatcttaattttcttcaatttttttttttttttttaatagggtctcactctgttgctcgtgctggagtgacagtggtgtgatcttggttcgctgcaacctccgcctcttgggctcaagtgatcctcctgcctcagcctcctgagtagctgggactacaggcatgcaccatcatgcccagataatttatatatatatttttttatagagatggggtttttgccatgttgcccaggcggtctcaaattcctggactcaagcaatctgcctgccttggccccccaaagtgctgggattacaggcgtgaaccactgcgcctggcctgttttcttcagttctttattaagaaatgaaacagtaaaatacagctgaagccccgtgtttgttctttctgattctccctctgtgcccctctgagataacttctatgagttttgtgcatttttttttctttttaataaaaacagggtcttgctctgttatccaggctggagtgcggtggcgagatcatactcaatgcagcctcaaccttatgggctcgagtgatcctttcgcctcagcctctcaagtagctacaactactggtgtgtgctgccatgcctggctaattttttatttatagtttttaaagacagggtctcactatgttgcccaggctagttttgaactcctggcttctagtgatcctcctgccttggtctcttacttaaagcactgggattacaggtgtgagccactggctgctcacatgttttttataatagtacttaataattttatgtctgaaaatattatataatgttattttgcccatttaaaaactttaaaaaatgctaacaaactgtgtactctgtaacttgtcttttttactcaacactacgtttttgagaatttttcttgttgatctgtgtagttccattttaactgttatatcttactatgtttcattatgcaacagttggttcaatccattctcttgttaatggaaatttagtttgtttctaatttttgccagtaggaacagtgttgcaatgcatattcttaaacatgtctgtacacatctgagggtttcatttatttgtgacaaaacttgccaggtcatagtgtttatgcaccttcaactagatattgtcgttgtcaaagtttttttccaaaaggattttaccaatttatacatgaaccaccgatagatatcctcttaacacgtggtattctgaaacttaatttttaccaatcagatagatgtgaaatcacgtagacttagtttgcatttctttgacttctagtgagaagtagtgtcttcacatattttttggatttttaaaatttattttttatttttgtttttcttagagacagggtcttgaacttttacccaggctgaagtgcagtgatgcgatcatagctcacgctaacctcgaactcctggactcaagtgatcctcctgcctcagcttcctgagtagctgggactacaggtgtgtgccaccaagcccagctaatttttaatttttttttttgtagagacatgctgtgttgcacaggttggtcttaaactcctagtctcaagcagtcctcctgccttgactttccaaagtgctgggattacaggggtaaaccaccatacctggccatatcttttggatttattggtcatttggattttcttttgggaattacctgttcatatttttctccatttttctgctgaataatttgtcttttcttacttatttttcaagaaattttacatattttctggctgttcattgtcagttgtatgtgctccagataacttgaacagtctgtggttgccttttaatttttgaattatgtctttagttatgcagaagtttaaaattttaacataaattaatttacactatttttctcactttagcatgagtctatcagatggggatgtggtgggatttgacatggagtggccaccattatacaatagagggaaacttggcaaagttgcactaattcagttgtgtgtttctgagagcaaatgttacttgttccacgtttcttccatgtcaggttggtatctctacatttcatttttatatggctgataattgtaatatgtcaactttatccctataaaattaagttcttttattagctggccgttctctcattatctcaaatttatttaagtatttatgttctacctgattcactcacattccttgttttatttaattttcacaacatacctgtgaggcattgacattttttctgttttagagaagagaaaactgaaattttaagaggctaaatgaccaggatatgtactgctattgctagcaggagtggcattcaaactgattattttttcttgtcatttatcaatcaggactgtttgctttagttaagaaatactcaaggtcaatgtgtttctgaatttaaaattactgttaaatacaaatttacacataaacatggtatgtataagaagtaggacataaatccatcatacttgacagaacttatggaaataacaagaaaatgttacagtttttccccagggattaaaaatgttgcttgaaaataaagcagttaaaaaggcaggtgtaggaattgaaggagatcagtggaaacttctacgtgactttgatatcaaattgaagaattttgtggagttgacagatgttgccaataaaaaggtaaaagcaatatatatataattttcatgatgaagattattttgtgttacacagaatgtactttctatctgaatgttagatttttttttgaaaaagcttgttatataatgtttttgtagcaataaaaaagttccaagtgaatgttctttaatgaaaacctttatttatttatttatttttaacttttgtttcaagatcggggtacatgtgcatgtttgttacacaggtaaacttgtgtcatgggggtttatcatacagattattttatcacccgggtattaagcctggtacccattagttatttttcctgattttcttcctccctcctcccaccctccacctcccacagtgtgtgttgttcccctctgtgtgtccatgttttcttatcatttagctcccacttataagtgagaacatatggtatttggttttctgttcctgcgttagtttgctaaggataatggcctccagtgccatccatgtccctgcaaaggacatgatcttatttattttttttatggctgcatagtattccatggtgtatatgtaccacattttttttaatgcagtctatcattgatgggcatttaggctgattccatgtctttgctattgttaaatagtgctgcagtgaacatatgcgtgcatgtgtctttgtaacagaatgatttatattccttttggtatatacccagtaatgggattgctggggcaaatggtatttctttctttaggtctttgaggaattgctacacagttttccacaatggaaagcctttagttctaatccatgtcttggcatagagtttcttttctttttttttttttttttgaggtggagtttcgctcttgttgcccaggctggagtggaatggtgtgatctcagctcactgcaacctccacctcctgggtttaagtggttctcctgcctcaggctcctgagtagctggggttacaggcatgcaccaccatgcctagctaattttgtatttttagtagagacggggtttctccatcttggtcaggctgatctcgaactcctgacctcagataatctgcctgcctcggcctcccaaagtgctgagattgcaggcgtgagccaccgcacctggccggcagacagtttctttttttctttttgagacagagtcttgctctgtcgcccaggctggagtgcagtggtgcaatcttggctcactgaaacctctgcctcctgggttcaagcgattctcctgcctcagcctcccgagtagctggcactacaggcgtgccaccacacccagctaattttttgtattttttttagtagagacgaggtttcaccgtgttagccaggatggtcttgatctcctgacctcatgatccacctgcctcggtctcccaaagtgctgggattacatacagtttctttaagcaagccttctcttttccttcctcccagttcttggtactctttcactttcatatatttgcaaatgtaaaattgtgttttaggtgtatatttttaatccatgtataccagtaacttaaaaaaaaatttttttttttttaagggagagcataatggagctcttgtgatacggtgctcttagtggaagtttggctatcaattccatcacctgtatttcacatattttattaatgaagttcttaaattaaattctcatatttagccaagtattcatttggctgggaggtagaaagcctactaaccaactttttttcatgaacaatatttttaaagtccaagatttttaatacctacattagggaaattctagaattaaattcttacaatgtggactgcatatgaggcttttagtgacagggaatttgttgaaggctatctgtgggttgtattttggtataacatttcctaattttatttgtggtatgttcatttgatatcatttggtaatacctgaaaacaggaactgattttactgtgttgctttttcatcatttctagctgaaatgcacagagacctggagccttaacagtctggttaaacacctcttaggtaaacagctcctgaaagacaagtctatccgctgtagcaattggagtaaatttcctctcactgaggaccagaaactgtatgcagccactgatgcttatgtacgtgcttaaagatctttagaaattgtgatgtgttttaaaaacattattataaatgactttagaaaaattttattatagtagtggcagaaactctaccaaaatattttatatcaatttggcattgaaaaatgcttaggaagacatttagtgaaactattcattttcgatattaattagcaagtaccaatcaacagattgttcaatgctagtttattttcattgtcatgaagccaaattaatgtctaatttgtatgttaaaaaatgtgaacttgctgaaaacatgaaaggctaataaatccaggctgagcaagcataaatagtactgatgatggatttgatatataaacaattcagaatgaaaataattatagtacagtttctattttaaaactggccttatttcttatatataaaatgtggtgaaattttagaaaaattgcctccaaatttagcttgttgctgccattagatatatttttatatttacatgtttgtatgtagtgaaatctgggcttatctttatatatagcactattgtgtgttttttaagaaatgtattttattccacagtgaatttgttttctcctaactcatgctttcatttgtagatgaatattttattgtttctcctttgcatctatcaaaggaatggaaactcctttgaattgtaaccagcaaacaattcacttttgttagggaaattggatgataattttcctttaaaagataccgccaaacttgagactaacattctcagctgatttaagtaggatttctcttactagattgcattttgttagattccattttaagttattttatttggatattgtgtgtaatattgagtgtgaaaaagtgaaaacaaacttttaaggctcaggcacctttctcaattttcacaattggtatgattattaaatgaggacatattgatatttgtgtcacataataggttgaattccatgtttgggtgctttgtgaatcattctcttcgatttttctgaagatgggacttactgttttatttcggtgatctttagcatactttttaaatttttctgtttttttataggctggttttattatttaccgaaatttagagattttggatgatactgtgcaaaggtttgctataaataaaggtatgttaagatccataaataaaatgtgaattcactcttttgtgaggtttatctccaaaaaaggcaatattcacatatttgcaaagcatttagtactataacttcttgaatgtctgagcagtcctgacattagggtgggatccatcagggcccaagatgagtgtttcatctttgttacttgtggcaaagcagcccttacttcttttactttgtagcattgctatgtatttggcttctagagttggggctttgtggctttcttattgcagtgacacaaccagctttctcctagtctggagattatacatccttgctataagtatttaaaatgctttctatataatgctttaaaacatgtaagatggcttatccccaagatggtagctaataaacactaagtgataaagtaggtaaagatctatttattcatttattaaatattgttggtcattttacagtgctttctaacatactgatttacatttctaattttcttctgtcatttttctccaaaaataatggtcatgtcatccaacctcagtgctgtttttagaggtcttgataagccagtgagagcagaaggagccacgtagtagagtgggtgagcccaggctttttgttgcacagaccaatgtgaatcccagccatgtgacctgggatgtacctgtttctccaaacatggaatgtagatactagcataatgtccgttttaccgttttatagaataattgtgaagacttaaagggacaaactattcgaagcatctgtattgatataaagttatcactattctcgtagcttccttttggagattttaaatgattgtgtttgttaagatgttaattaaattaggccattttgctaaatgctcttaaaaatatggcatgactgcctcatataaaatgatatgatattctttataattgtcgttgagcctctgtgggtggcaggccctcctttatatgttaaggtagaagagtctttattcttacttctcctccctggagagccacttcctatgaatgcctgctggttctctgtagtcagaggtcttgtggctgtaacttagagtcagtctccatatccctgggttctgcatctgtggattcaaccaaccacagattgagaacattcaagccaaaaaaaaaaattcacagttttaaaaaaggaaaagttgaatttcttgcatggagtaccacattgaatctatatgaatgaagtgatgcgtaggcattttataaggtattataagaaatccggagatgatttaaagtatacaggacaatgtgtatagattatatgcaaatattgcagcattttatataagagacttgatcatctatggatttgatatcagtgggagggaggttcctggaaccaatccctcaaggatacagaggaatgactgtatgttaattaactgaggcaggtgatcggttttttaagctgattagggaaacagtatataagaacttacttaactcataataaaactaaaattcaacaggggagagttatgattttttggctttatggttgtggaattgcatgtaggttacatgtacaattttgttacatgtgcaattttgatgaaaatgcttccaaggaatgtttatgatatttttcactaaagtaacatatattaataacacagtactggaagtcctggtatctgtgtacttgtcattgtaatgctacattatttgaccttcactttttttcccctttattacattatatgtgtgagtatattgtgacatcttgactcagattccagtgaattgtattaggttggtgcaaaaataattgtggttttggtaatttttaatggcaaaaaccacaattacttttgcaccaacctaataactaagattaccatctttttttccttccttcctcccttccttcctttctgttattcagccagaagtatcagcatcactgttctcttattttcttcatgtacatatggatgatattttcgaatgaccacttttctcttttgctttttattattagactgtttttttcttcttgttaaaggataaaaagattagaacataaaaggatatttacacattgtttccccattgacttattcccaagatggtagctaaaaacaccaaatgatatagtagttaaagatacattgactcatttattaaatattgttgagcattttacgatatgggaataccgtagtgaacaagccaggcatactctgtttcctgaggggcctacagttttattggggatatagatgagtgaagaaagcaattgcagtgtagggagatgagtcttatgtcatgggaaaacaaggtgctgtagttgacacaccgagaggcatctgacacattgggggaaatattctagaatatttcctggagaaagtgcaggtaaaagccagacctgaaacctgagcaagagttagctaaggccaggtgcagtggctcacgcctgtaatcctagcactttgggaggccgaggtgggtggatcacctgaggtcaggagtttgagaccagcctggccaaaatggtgaaacaccatctctactaaaaatacaaaaaattagctgagtgtggtgacgggcacctgtaatcccagcttcttgggaggctgaggcaggagaatcgctttaatctgggaggtggaggttgtagtgagctgagattgcaccattgcactccagcctgcacaagagcgagactctgtctcagaaaaaaaaaaaaaaaaaagttagctagctgaagagtataggaaagaatgggtacaggaaattacaggtgccaagttacagaggtgagagaaattatggtatctataggtaattgaaagtaattcagtatagtgaacattgaatagggctgggcggatgaaggcaaagcagaaaaaggaaagcagatgggccatggtaaggagtttatatctcctcccaagagcaatcgaagtgactgagagttttaaacacagcagtgaagtgaattacattaaaaaaataagaacttgggctctagaataaaaaacggatataggaggaaggcaggagtcacagtaggaatatcttttgggaggctgtgacaataatccaagtgagaagtaatggcaacttgagtcggttaattgtgttgagaatggagagaagttgacaggttcaaaattcatttttcttctttttttgagtctcactctgtcacccaggctggagtgcagtgatgcgatcttggcttaccgcagcttccacctcctgggttcaagtgattatcctgcctcagcctcctgagtaactgggattacaggtgcctgccaccacgcccagctaatttttgtgtgtttagtggagatgtggtttcgccatgttggccaggctggtctcgaactcctggtctcaagtcttccgcccacctcagcctcccaaagtgctagaattataggcatgagctaccacacctgacctcaaaatacatttaatagagcaagcatgagccactatgcccagcctcaaaatacatttaataaaccaatggaatttgaggtaatgatgaaagacacatgtcaaggatcattcctgtgttgttggcataagcaacagggatgaaaagcattgaggaagagcaagattttgggatgcgttgtcacacagttgattttaggtatgttaagggagggagacctgtaagacagcaaagtggaggtggtgcaagaattagttgtgttggctgtagcacagaggacagtttgagttaagagagttgggactgagaatcccgaggaactcttagtgttgaacatttgcgtggaggaggggacaccaaaggagttgccatagacatcgaggaaattaggaggtgtggtgtgcagaaagccaagtgaagaacatgttttaagtaggaggatgctatcaactgttttaaattctgctgagagtttgagaaactgaggacttagaattcatcattagatttggcaatgcgccaatcatttgtaatcttttaaacaatagttttgctgtactgggtagcaaaagagtgatttgaggagtggtcatttggagcatatgctattcaaacagagaagagtccacgggctttggtaacatgaaggtcctataaccatagcaagagaatgaggtgggtggaagtcatattaacgtgaatagaggagtaggttagatctgaggaatgtgggaacagagacagggtctcattatgttgcccagcctggctcagactcgtggcctcaagcgatcctcctgcctcagcctcctgaatacctcgggtttcaggcctctgcatctggcttgaaaacaacattttctcagaagcttgttttagttgttttagaaataacgaaggcatgtgtaaacaactgttctagaagcttagtttggaaagggaacgtttattgatgcatataacacttatatgttgggtgcttatgtgtcaggcactgttagagttgctcgggaaaatttacaaaccaagcaaaccatgccccttcatttcctttgggtgaagtgagggagccatgtggttatctgaaggaagagcttagcaggattagagggaagaaagtgcaaagcctcctagggtgattggctggctcttttggaggaacagtacctataactgaatgaaatgagtgagggtaagagtggcaggaaatgaggctagaaaaggagcttgggccatatcacgtagggcctcgtaggctgtgaatctgacttcatttcttattaatgaaaataaatacgatgatgggtgatgggaaacccatagaggatttggagcagaagaatgatataattaaaattttattttagaaatatttttctggttgtcgtaagaggaaaaatatttagccccagggcattttggcagagagttaggaggctattgtaacagcccaagcaatagacaataattgtttggattaggcgggtagcaatagaggtgatgagaagtcgtagcttctgtaggtatttggaagatatatattgtgaaggatttgctgatgaattccctgtaaggggtgagatgtaaagattcatagaacattaagatattttggtcagatcatctgatcaatggaaaggtcagttatagtggacagattatgagaagaacaggtttgggtgagaaaactttagatttcagtgttggatatcctaagttttagatgattattgatatccaagagatatcaatatttgggatcaatttgggaaatatgatcccaaagttcaaggttgaggttggagatgtaattcagatccgatggtagttaaagcagtgagactgaatgagataaaatagggagtgaatgaaataaagagtaggtgtgatattgacctcaagggcacaccagcatttagaggttgggaagatgaggagagagcagcaaagaggactgggagggccactaatgaaggagggaagtacaggaggtgtttagttctgaagccacctgaagaaaatgtttggaataggaagaagttgtcagttgctttaaatcattcggggaggttgagtgagatgagagtctagaactaacagttaggtttgatggtgtggaggccatcagtaaccttttctttcttttttttttttgagacagagtcttgctcagtcacccaggctggagtgcagtggcgcgatctctgctcactgcaagctccgcctcccaggttcacactattctcctgcctcagcctccggagtagctgggactacgggtgcccgccaccatgcccggctaatttttttttttttttgtatttttagtagagacggggtttcaccatgttagccaggttggtctcgatctcctgacctcgtgatccacccgcctcggcctcccaaagtgctgggattacaggtgtgagccaccgcgcccggcccaagagtaaccttttcaaaagcagctttgctctactgatttgggtaaaagcttagttgcagttggtttgggaggaaatgggagcagaaaatttgagagagtgagtgtagacaactctttcaaggaatttcgctataaatgggagtagagatctgaagactgaataattagcaaactgaaaagtgggaagacgtaattctcttattatttcatttttcttagtgaaataagaggtgaagttctctgagtaataggagggtcaaacaggtgttagaagttcacaaagaaaggaagaggtttgaaatagtcattttgagagtgggaaatgtagaagaattaacagtcattgctgagggtgcgtttgaaatctgtcatgagtttaaaataacttgtgtcatcatcgatgtgtttattttcaactatattcaactgcttgggtgtaggcatcaggtaggtaaaaaaagtgggttttattatgagtagaggttttgccacgtaattaccatggagggagggaagagcaaaggagttgagagtatagatacaaaggaatgattactgtaatgtgggtaagagaggaatggaaggctcagtgggcagtgggagtagggatgttgataggtaaggaaaaggtgataggatcaatgcatttggttctgcaagtgtcaaagtattgttggggaaagcatgctggaaggaaagatagggatgctggtgttctcagggtggaaggcttacagttgtagtctggaagtggtgattttattggcaattataaggtcaacggtatgactatggaattgagtggctaaggtctgttgaagaaaagattgtcggaaatgcaggggtcaaggaactggcctgtggatgttgaactcactggcagtgatcaaggaatagtagtggagtgaaagtagttaatgaatcaggcactaagatctccaagggatgaaaggatgcagtttggagatgacaagataactgtagtaatcaggaatagcaggttttgtagctctgtctcataggcctcagaggagatgggcttttgaaggacaagagaaatgatgatgaataaattctaagcaggggaagtgtttgggaaagcagggcaggctttgtgctgttgatggcaaatgatgtaccagacaggatgaagttgagaatttggaagttgatcactgattagaaaggcttacattttattttggccgggggtggcagctcatgcctgtaatcccagcactttgggaggccaaggtgggcggatcccttaggccagaagttggagaccagcctggccaccattgcgaaacactgtctctactagaaatacaaaaaaaaaaaaaattagctggtcgtggtggcacatgcctgtagtcccagctactccgggggctagggaatgagaatagcttgaagccgggaggtggaggttgcagtgagccgagattgcgccactgcattccagcctgggtgacagagtgagactctgtctcaaaaaaaaaaaaaaggaagggcttacattttattttggtgctgactgggaatgaaggcaatgagggatgactgttggagaaggctgtgcttactaaacagtattattaagtagcagcatacatggtgttatactgacttctgattttgcaatagtacagacaggttcagattctcatttccaccttctccttctgcctaggtgaataactgctgggttatagtacagatgactgcagatcatttggaatttactttaaatgtaaacagtaaaaatttgaaagagagggaaagtgattgaggcaatttggggattgaataagaaggtctttttgttggaattcatttaaggaaagaaaatgaaaatttgatccctaatattatttaatgaagtggctaaatgaatatctctgctttgtggtttgaaaattaatattgattttttttccccctagaggaagaaatcctacttagcgacatgaacaaacagttgacttcaatctctgaggaagtgatggatctggctaagcatcttcctcatgctttcagtaaattggaaaacccacggaggttaaatattaccttttttttttttaacttaaatcaattctgtttatttttttatcacattttcctatatgtgaagaatactattcattaaggctgactcatagaaatttgcttgaatacacacacacagactgatgcataaatttgagaaatatctttccagttgttgaatagtgaatccaaaggtttaagccttttctgtctgctttgtaggatgttttatgaaacaaaggaatagaaattgtattcatattatacattttgaaattatatctatattatattttttgtcaaagcaaaataaattatacattaaggaaaatatttaagattcaaagttgtcattttctttctgttaatgagtatctttgatttaataacatttatagtttggtcacttgaaatctatagtgaccaaaagcaatgtcatatttagtagcctcatttctgttactatctgattattacttaagaattctacttaattaatagattattagaacaaaaggcattccaattttagagattcttttatggttaaagcactaggtaacttaaaaaatttggatcaaatgttatacagattaatagaccttggaatacaggggctatgtctttttggaatcagaccttgtcctggccttaattgcaggatgacttccttattaaatctctaaaagcaggaatgctctggaacaatgaacaattagaatgtggtaatgtaattttgggccaaaaaatactttgtagaaatgtgattctcttacttggaatagaaagaattctgactcgaaaaagtgcagttaatgtatgcttttctgggtaagatttgtgatagattttgattgagatttaaaaccatgatatataaatttagcttttttgtcaaagtaatttgccaccctagaatttgtgttggtaatttttaatgcaacttggacaatttctgaaagatgtaactttcttttttttgagacgagtctcgctttgttgcccaggctggagtgcagtgacatgatctcaggtcactgcaagctccgcctcccgggttcacaccattatcctgcctcagcctcccgagtagctgggactaccggcgcccgccaccccacctggctaattttttttttatttttagtagagacggggtttcaccgtgttagccaggatcgtctcgatctccggacctcgtgatctgcccgcctcagcctcccaaagtgctgggattacaggcgttagccaccgcgcccagcctgaaagatgaactttaaaatggggaaggatactagtaaagccatttcttactcatgtatacatttttccctccatgaaattagagcagccaccttttacatgacttttacatgcatttcagatttttgtactagcaattaaaatatctactggatgtaaatcacatgtgcttaatgctttgcttcataatatctgttgaagtcaattaaaatatagagacagatctttaaattgaacatgttttatttgggaagcaagaattaaatttgaggcatatacacagactgggtgtccttggtatctctgaagaacaaagagaagtttggaggttatagaaaaaggaaaatgtgacattgtttttccagaaagttctttggcactagtaaattttggggagttggaagctctgatgggttagtgactgtggtgggtaaaactagtcttagagtcacaacaggttgtttcagtatctattagataaaacaggttttaggttacaataggcagtttcagcagctaggcttgcagaaaattacattcttagagtaatgttatgtgccttgagtgcttttttccccttggcccttgactctgatttagttgggtatgacaagaattatcaatttatataattactttttacatattgaagctgaataggttttcttaaaacttggaaatgggaaatactgggtcttgtgaagttttagtgtgaaaacgataactagtctcttatttcatgctctttgtaacaagtctacagtaatacctaatgtatctagatgacacctcagaaccaggagggaacaaaaaagacctctgagcagtcaaaataatgctataagcatgtattccagcttactttcggcatttctgtggagtgcaggaggccacattttgttcatagatccagtttgacaagcttgggtactgagttaaagtgaaaatggtgtaaataagtaatcatattcacatgacagtaggtggaagtgacagctgacaatctgaaagagtggacaaaactataaaaattagaactaagaactcttaaaatagaacggtttgaagtttgttacagaagggagcagctttatgcttcagtggactctgaaggtattggcagtgtatagtactgcttagtcattgatttaaattcggtatatatctcttctattgctgtcatgtacttgacattctgctgggtgctaaggctgtctgcaggctactaatatgcataataacaatcctgaaaaagaaggaaaagtatactgtgccttactgaagaaggcaggacagccgttggtatttgttagagtaaatattagttatcttacataaagcatgttatattccctgatgtcagggcctgataaatgagcccttacactcttgatagtcaatctgtgccactgttgctgtgtttgtatgttacaccatttcctgtccatgtaacagttaaactgtatcacatatctgttcctactaaactatttgcatataattttaacatttgagtggctgtatataaagctaaaagttctttataagatttatagcatcttagaatgtttaaattagataacattagtgtgcttttagtttttgaatttaattttgctcttgattttgtttgtgttaatgtagactttgtctacgtaagcttgagcccaactttggagtggtgttttcagtgatggaagtaactggaaataactcatgaaaccacttagtacttttgatagtttattcccatgaaggatcaaatttttacttgagtcattaatataaaaatttaaaagacatgtcagattttattaagcatggattttaaatatataaatattagaagacctaaacaaaatcgctaatgaaagagtaaaacatgtccctgcctatcatactcccttcactttcactgatttctgcttttatgaagtactttaataagctctacaacaaataaacaagacattgtgcctcattttacactctagcagtggttttccattccaactaactagattgggtttataatatagtcatttaaacttacttagttaaaatgttatacattagcaactgcaattaaggagctaagaaattcagctcgtatttatttatatgcatcttatccatagtttctcacttgttatatttgcctactgatggcaaattgattttttctgttccaaaaatgtagtgttttgagatttttggagatgcaaaacagcatcattttcaaattagatcacaaacaatcttacttgttgcagttgagactagtaattgatcagtgaggtgaaaaaattaggcaaaacggtatcatcaaaattttctttctttttttttttgaaacagagtattgctcttgtcgcccaggctggagtgcaatggcacgatctcagctcagctcactggggcccctacctacgggattcaagggattctcctgcctcagcctcctgagtagctgagattacaggcgcatgccaccaagcccagctaatttttgtatttttagtagagacagggttttgccatgttggccaggctggtctggaacttcagacctcaagtgattcacctgcctcagcctcccaaagtgctgggattacaggcatgaaccaccgtgcccgccccaaattttcttttaacttaaagtgttaatgtttgtttgttcccaatatttttatatatgtcaaggctttttcattatatacaggccagctctttggagttctgcatagtgtttcttgtttaaaccacacctataatgtaccatctacaatttccaattctttaagacagagtgaaaaattaagacacctgaagcaatctgagtgcggagtcctaggcattatgattttccttgacacttttagggttcttttatcacagtttatcaaacacctttttttttttaacaaaaaacaaatttacaaaatctttccatgtattcaacttagaatttaatgaaatagggtttttttttttttggtggtcatgtatcatcaactttctttacatttaattaaattaatcaacaaaaaacatatagttgacataaacaaatttgggaccaagcactactgactcttagtaaacatacaagtcaactgttggtgcagaagtgccttgatgctagagagtagcctgcaagctgtaattatatatgggcattagggaatgaagaacagccttaatactattgatcttttaagtgaaggtcagcttagaaagcttttacttgttaaaaagcttcacagtttgtccttgtagttaatgcaattgaagttgaattaatctttcttaattttttttttagggtttctatcttactaaaggatatttcagaaaatctatattcactgaggaggatgataattgggtctactaacattgagactgaactgaggcccagcaataatttaaacttattatcctttgaagattcaactactgggggagtacaacagaaacaaattagagaacatgaagttttaattcacgttgaagatgaaacatgggacccaacacttgatcatttagctaaacatgatggagaagatgtacttggaaataaagtggaacgaaaagaagatggatttgaagatggagtagaagacaacaaattgaaagagaatatggaaagagcttgtttgatgtcgttagatattacagaacatgaactccaaattttggaacagcagtctcaggaagaatatcttagtgatattgcttataaatctactgaggtactaaataaagaggaagcacatttttagttattagtaggttctggcagactttattcccgtaaagagacagatagtaaatattttaggctttgtgggacatacagtctctgttgcagtaactcagttctgttattgtagtgtgaaagcagccacagacaaatgtaaacaaatgtgcctgtctttcaataaaactttatctacaaatacagatagtgggccacatttggcttgcgagctgtagtttgctgttcctgacttagtatgatatgcagcattgtgtagtggaaagattttatagtatcaacagacatttgtaggagtttgctattttataatttcgtatgcttttttcataatagatgtctctgctttttgtggattctcttcatatctactagtgtttactcttctgactttgatttttgggggtgtattttatttctttatacagaatttttttcttttttctttctttttttgagacaaggttttgctgtgtcaccccagctggagtgcagtggtgggatcttggccccctgcggtcttcaactcctgggcttaagcgatcctgtcacctcagcctccctagtagctgggaccacaggcctgcaccactacactcagctaatttttgtattttttgtagagatggggtttcgctctgttgcccagactggtctccaactcctggactcaagtgatccacctgccttggcctcccaaagtgttggaattataggtgtgagtcactgtgcctggcccagaatttctttacttgctcatgtgagagagtttctaataaactcctgatgcttttgcttgacactatagttttactgtcatctcagagtcagattttttccttaatttcttcattaaattgatttcttaatttctcatttgttttgcattagtttacaaaattacttaagatgcctatattctctgaaattttatattttatttcacgataaataagtttaaaaaattagatttgaccatttaattagagttatttccccatcatttttctaatggcaacaataattttagcatttgagcaattctctgtattttggtaactattagtaatcacttttatcagtataaacatgcatttcattttaaaatggttttcaaaatattctcataccaaccattcataaaagatgttccccttctgggaaatatcagtttttgctaacatctgcatttccctttgattttctaggaatttcttattaggtatacactttaagtgatatgtttcatataatattataggattatcaggatttcatgattttttttttttgagatggaatctatctctgtcgcccaagctggagtgccgtggcgcagtcttggctcactacaacctctgcctccccggttcaagtgattctcctacctcagcctcccgagtcactgggattacaggtgcccgccaccacacccggctaatttttgtatttttagtagagaaagtgctgggattacaggtgtgagccactgcacctggccttggatttcgtgatttgactgacatcttttacaccaattattgccatttttttattgggtactaattattagtattgctttctttattcgttaaataagaagtaaaagaacttttaaaaaataaaataactttttttcctagtacaaagcttattttcaattttttttattgcttaaattttgcaggttaattaaggctgtacttctttttcctacttcctgtttaaatatttggcattttttgagggttttctttctatggatttttgtgggggatcccatctcgttggacacttggttcctggagattgccaaattattgaaaagtttcctcatacccaaacattggcaatagactgaataaataacatctctgacattatttttcaattatatagagaatgctttttgtaaaatactgatttatttaaagatattacaatcatagtagttttttgcaatcttttttaaatcagtggatgtcaaggaacaactattgttctttgtacggcatttttcaacattgtgaagagttcttatactcaaaaagtttgggagacacagtgtgacattgtttaacctgagttgaacttgtcattttgtattcttgtttagagcagggattttattttgtctctttatctaactttgtattcctaactatttctttctttctctttggttctttgtttctttgttcattcttctctctctcccttttttatctatcatataaatatgtaaatatatattatatatccattagggaagaggaagttgtctaaagatatctagtatataggagctttgttctgcagaaaagaggatatgaagtcaattatattggaaattaatgcttaatactttttttaaagcatttatctcccaatgataatgaaaacgatacgtcctatgtaattgagagtgatgaagatttagaaatggagatgcttaaggtatgtttacaattataaaaatattacttcaagttctttccaaaggacatttaattaagtaaaatattaactaattctaaactaggttctaccacaatgaaattgctactaattatgtaacattagatttcacattttccaattcatgtttctttcatgtagtctataaataatgggttagaggtaatttactaattttaaatgtgctttccttgttccttcttattttttattttgaagacagggtctcactctatcacccaggctggagtgcagttgctccatctcggctcactgcaaccttcacctcctgggctcaagtgatcctcctgcataagcctcccgagtagctgggattatgggcgtgcaccaccatgcccggctaatttttatagttttagtagagacagggtctcaccatgttgtccttgctggtctcgaactctttacctcaagtaatccacccgccttggcctcccaaagtgctgggattacaggtgtgagccaccacacctggccttggatttcatgatttgactgacatcttttacacaaattattgccatttttttattgggtaccaattattagtattgttttctttattcgttaaataagaagtaaaataacttttttttaaaaaaagaacttttttcctagtaaaaagcttattttcaatttttttattgcttaaattttgcaggttaattaaggctgtgcttccttttcctactttctgtttaaatgtttggcattttttgagggttttctttctatggatttttgtgggggatcccatcttgttggacacttggttcctggagattgccaaattattgaaaagtttcctcatacccaaacattggcagtagactgaataaataacatctctgacactatttttcaattatatagagaatgctatttgtaaaatactgatttatttaaagatattacagtcagtagttttttgcaatctttttaaaatcagtggatgtcaaaaacagctattgttctttgtacagcatttttcaacattgtgaagagttcttatactcaaaaagtttgggagacacagtttgatattgtttaacctgagttgaacttgtcattttgtattcttgtttagagcagggattttattttgtctctttatctaactttgtattcctatttctttctttctctttggttctttgtttctttgttcattcttctctctctcccttttttatctatcatataaatatgtaaatatatattatatatccattagggaagaggaagctgtctaaagatatctagtatataggagctttgttctgcagaaaagaggatatgaagtcaattatattggaaattaatgcttaatacttttttttaaagcatttatctcccaatgataatgaaaacgatacgtcctatgtaattgagagtgatgaagatttagaaatggagatgcttaaggtatgtttacaattataaaaacattacttcaagttctttccaaaggacatttaattaagtaaaatattaactaattctaaaccaggttccaccacaatgaaattgctactaattatgtaacattagatttcacattttccaattcatgtttcttttatgtagtctatgaataatgggttagaggtaatatactaattttaattgtgctttctttgttccttcttttttttttttttattttgagacagggtctcactctgtcacccaggctggggtgtagtggtgccatcttggctcactgcaaccttcacctccagggctgaagtgattctcctgcatgagcctcctgagtagctgggattacaggcgtgtgccaccatacccggcttatttttgtattttttgtagagatggggtttcaccatgttgcccaggatggtcttaaactcctgggctcaagtgatctactggcctcagcctcccagcgtgctggggattgcaggtgtgagccgccgcatccagccctgtgttccttcttgtgttactttcttgtaattttttcctggaatatgggtagtgatttggctctccagtattgaaattgagtttcctttcttccaattcatgtgtatccatttttatttggaagttttgtttttatacattcaataatcatctttactttctttggtattatttactatggatattttatattatataattttcaaatggattaaatggttcagttttactcttattattgagattgaaaatactagtttataatttatatattttctattcctttacctctaatttctttgtcaggtgttactaaccaaagatgtataataagaaaagccaatgtagctaaattaagtaaaaaatgaagaaaaacacagaagttccccattatgcatttttttattcctaatctttaggttgatgagatttttttatttttatgaaatgagattaatttattgacttttttagttttgaggccaagtaatgagtagtgagtaagaatgtatattctagggccaggcatggtggctcactcatgtaatctcagcactttgggaggccgaggcaggaggatcacttcattccaggagtttgagaccaacctgggcaacatggcaaaaccctctctctccagaaaaatacaagaattggctgggtgtggtggcatgtgcctttagtcccagctacttgggaggctgaggtgggaggatcacctggggagcctggggaggttgaggctgcagttagccatgaccatgccactgcactctagcctgggtgacagagtgagaccctgtctcaattaaaaaattaaaaaaaaaaaagtagattgtgaattcagatgtaggtttgtatcccagcttttccagttagtatctgtgtgactttggggaagtttcttagcatctttgatactcggttaacagttgtaattattatttaaggtattgcttgagaagagcttagtatagagcctgacatttagtaagtgtttaatacatattagctaacagtaaaactagaacataaatactgaattgtattttgttattaattatccatttctctgagaagtactgttccaatagtacatttataggaaacttgtggacgtctacaaacgtatacattaaatctcttagaaggcaacctggatgcccatattagagaactctattttaaacatgcattctaagtatgtttgtggacttgaataaaataaaacaaacagaaacacttctttcttctgccttcaggcttgaaatgaacatacttttttttaaaaaaaaaccttcaaaatgaaaatattaaataaaagatttaataaaaagagaaagtaaaaactgtagtttaataaagtcttcctgtctcttcatagttaaaaaatgttatagatgaaacaattttgaaatattcttgaaatagataatctttatttaggggagaatgtcagatactgtcaagccaaaataaaaacaaataactttatttcatgtttgtaaaattccttttctaaaatgatttgaatcttttgttgttttgacaattccaaaacacatttattgtttgctcatagtttcagccttattcagaaagaatgcgactgacacatgatatagagaaacttgttccaaaaataacattaaaatccacgtttactacttgagaatcgaaaatattgaggtgcaataaagaataaaatgttttaaattatccaaatttaaaatttatgatagctttccccaggggcagtttattatatgctattaatgagccttgtttatgctggaaatgttccatctttggccttgcgccttagaaaccattcatgagcacatatttaaaccggagcacacatgttcttttgtagtatggcttgcacatctgccagctttcgacaaaattgtaggccctgttaataatagtccttttgtgtttggtgaaaaagatacgacactgtcagtggttttgcttttaagatttcttttaaactttcagtctttagaaaacctcaatagtggcacggtagaaccaactcattctaaatgcttaaaaatggaaagaaatctgggtcttcctactaaagaagaagaagaagatgatgaaaatgaagctaatgaaggggaagaagatgatgataagggtaagcactgaagtatgtttgaaatgactcacctgtgatacctaccactgactttaacttaggatccagttttggatggtttggaggtcagggactttgtggcatatagttaattattggatccttataagcttttgtctccttagtgcttttgtctccataaagcacaatcttactacttagaaaaatagagtaatagcattatgatgataaaaatatctttccctttgtttttttgtatttctccaaatcattatagctctcatttagaattattaaagctgagaactctaacaatgaacttttattgtttagtggttaattatcttgattctttgttttgccctttcttggccactcaggaatctttcaagctcactgtggacagggaaagtgacttgggtagagctaacataacttcattgtgctgtgcagttagaattttgaccaaagatgtgggtaactaacttttcctaactaaatgacatttaggtaactaaactaaacgagattttcgtaactaaattttggtgtaactacatttagctttaggtaactaaaacgaagattttattttatctgtggatttttttagtgcgggactaatgtaatttctgattaccattaattgaaggttggttatattataacatttggattggtatattgcttgccatggtttgttctaaatgttagcctttagaagtattcctgattctaaaacatcagttttttttaatagtcctggcaaagtgtgaatcacaacaaaattctaatacttaaaagtaatccaagtgtcacagatggtacccagaagaccagtttgtattggaattaaaaaatagaaaacattaacccatggtagctgtcactgtattctttcaaagaagccaatgaaataaactgttttctccctctatgtggtgtttttctacttgaacataaatgcacattttattttatttccagactttttgtggccagcacccaatgaagagcaagttacttgcctcaagatgtactttggccattccagttttaaaccgtgagtataatctcatttaatcaaatcacatatttagtattctctttaaaacaagggaaaaggcaaataacctgtctgcttaacagcaacagcacaacttcactatagttatacatgccacactgtattttctgtgtgactacaaaattatttcaaagtgatatttatataaaattcatttctgcaaattgtttttataagtgaggaaaaatggttttcctttaactgagcagttctgagtagaaactagtttaaagatacttataaataaatgttaatttaatactgacttgtttttcattaaacgagtgtctatgtgcctgttttgtgtatattacccagaacatgcagatgtactagaagttcttaatacaacaatttgaggaatagtgataatcttatctattttaatgtactcaaaatttgtttacatctaacaggcacatttttgtgaggattaaatgagatgaataagaatgagatgaacaagtaaatgtgaataaaactaataagcctgtgaaaatctagactggatttttcctattctgagaatttaaaatataatccactgaagtatttctttccttttttcttttgatcttaaacattttttatttatgtcttacatacagaaaagtgcacatgttgtagagatcaatgaattgtcataaactgggcaccctgtggccagcacttagttaagaataggtcagtaacagcatgccagaagaccacctctccaattgatttttcccatgatattttattaagaaaattttctaagatgtagtaaagttgaaagaacttttttctgtgcatgtctgtattcccaccacctaaattcaactatcattactatacttgctttatcacatatccatccattcatatgtctctatccatccattcattcattccagttttaaaatgcatctcagggtcaatcgaggacaccattacacttccacctaagtatttcagcatgtaaattattaacgagttaaatatttacttaacagttttttctttggtgtaaaatttgcacgtaaggaaatataaaactttaagtgtacatttgcaaattttaaatatacatgtgcatacccatgtaacccaaattcttatcaagagatattattatcatcaccacacagagttcccttatttcccttttcagtcagtccttgtccctgagcatttctcttattattttaaagtattgattcttttggatatctagtatgaagcttagaatctgttttttactttagatgtatgtagtgaaatttaatatatataccaaatggtagttgttagttagcttgaatgggacattggtcaaatggcattgtttgttttaaagttccaggtttgtgcatttatgtatgaagtttgaaaataaattctatgagaggaaatgaaaaattgaatggattttaatttgtaccttgggtttcttattaataaaacaaaatagctttttgcttttcaccttcaagagttcagtggaaagtgattcattcagtattagaagaaagaagagataatgttgctgtcatggcaactggtaagttgtacttaagcaaaacctaatcctttaaaaaaataaaacataaagagtttgaaatgcttaatctttcattaaactctcaaaatacaaatgcaactacaaatgatgtaaactatagaagagagtgaacaaagaacagatgctcagatttatgtatcaattagcttttaggaagatagcatactagtattgaccattcatctgtataagtacattgtaaaaagaaatgaaagcatcaaaggtttatttttatttctatatttttttcattttatttttatatttttttcatttcaaggatatggaaagagtttgtgcttccagtatccacctgtttatgtaggcaagattggccttgttatctctccccttatttctctgatggaagaccaagtgctacagcttaagtaagtcatgttatcattgccacaatatcaccctctttttttcttctgtgggtgaaacatctgatccatcatgcatgttaaaatctagttcacaataacacatttctgcaggtattgctttatctttattggtaataaatgaccctttagtggaagagcttaccttctttcttgtgttctctgtaattcaaagctaccaggtggccctgataaaatttttttaaaaaacattattactttatgctggtttacattgaatatctcaaaattcttttctctttttgttacccttgctttttagcttgataagaagtgtatacatggaagtatattttttatctatgaaacacttttcagcttcttcaacctgagcttgcaatctgttttaaattgatacataatatctttacatattcatggggtactgtagtattttgatacactcatatcaaatacacttgatcaaatcagggcatttgttcatcaacttgaacatttatcatttctttgtgctgggaacatttctaatcttttctttgagttattttgaaatacacagtgttgttgttaactatagttaccctactgttggttaatgagtacaaacatacagttagaaggaataggttctagcaacctattcctttaccccctgtcatcccctgctgccctgagcttgcagtctctttcaaagacccaccttaaaaacttgcattctgataaggcccttgaaggaatttgcttatcaagttagtaagtgacaaaaaagaaaattgcaaagaacaggaatataaattattatatttctttattctttctcacttaagagtgaaattgatatgtgtaatgtgtacatggtgccagaatatttgtttttcttcttatagaatgtccaacatcccagcttgcttccttggatcagcacagtcagaaaatgttctaacagatattaaattgtgagtaatttttttccctcaacttttattttggatttatgggggtgcatatgcaagtttgttacgtgggtgaattacatgttgctgaggaagttgtgagtaatttatgtcatttctaatcatgtggtcagatgtctgtggtatatgagagaattttgtatacaaacaaattttactaaatgcatgaaaaaaaaagtccatgattttaaaatgcactttcttttgtacctttgcaggactgttactttttaaatccttcaaacttgaagaaatctgttattctcggttcttgggctataagattagcattgtactcatagaattataaaaattttggttttggaagagaagttggagaatataaagatttgtctcattttatagatgagaaaactgaggctcagagacaagtaatttgcccaaaatcacacaatgactggctgagcagggactggattctaggtctcttgcccaaccaattctatcatgatgtaattcctaaggagaatgtcatctcagatacacatacacacacccattttgtgtgtgtgtgtgtgtgtgtatatgtacacacacacacaaacatatgtacacttatatatacatacacacacatatattaatatatatgcatatatatgcatgttctaattcagaacattttcatcactcccaaaagaacacccctgcccattaagcagttgctttctttacgtatatattagtatatacatacacacgagatacacatatatttactgagttttgataaatgcatacaaagatgtaaaccaaacctctaacaagatacagaatatcactgacactctagaaagtttcttcatgtccctccccagtctgtccttccatcctccatcctaggcaagccactgctccgattttctctaccatagtttggtagaatgccatataaatgcagtcacacaatattaactcttttgtgtaagacttctttcatttgctgtaatgtttctgagattctttcatgctgttgcatgtatcagtagttttttgttttgttttgttttgtttttgttttttcagagtcagggtctccttctgtcacccaggctagagtacagtggcgcaatcatagcttactgcagcctctaactactgggctcaagctatcctcctgcctctcaagtaggctaggctgcaggtatgttccaccatgcctggctaattattaaattttttgtagagacaggatcttgcttggttgcccaggctggtcttgaactcctggcgtcaggattgtttccagttttggattattacaaataaagctgagacacatataagtctttgtatggacatatggtttcattttattgatacatgtcaaggagtgggatgactggatcgtgtggtggatatatgtttaactttcttttttctgagataaaattagaaggcgatcctcctgccttggctttccaaagtgccgggattacaggcgtgaaccaccgcacctgatgcagttgttgttgttgttgttgttttaatatctgattattattttattgtatttcattgaatatagcacagtttgtttttacattttcttattgatagacacctaggctatttttctggttttggactgttactaataaagctgctatacacatccttataaaaatcttttttgtgaacatgttttctttttttctaagcattttaaatcacctttattgaggtgtaattgacttacaataaattttatatgctgagaatgtataatttgataagttttgacacaggtatgcactcatgaaaccatcatcacaatccagataatgaacatattcatcacccacaaagtttacctttttgttttaaccccagtcaccgggtaactgctgagctccttcctgttactgtagactagtttgcattttctaaacttatatacatggagtcattcatattttatgtgctcttttttgtctgatttaaataatgcagtataattattttgagattcattcatgttattacagtgattaatagttcattcctcttattgttaagtggattacattttatggatatccaacaagttgtttatccattcacctgatagacatttggatcgtttccagttttgggttattacaaataaaactgctatgaacattcgtatgtaagtctttgtatggacatatgttttcattttattatatatgacggagcggaatgactggaacatgtgatgcatatatgtttaactttcttttttctaattgagataaaattcacagaacataacttttaccattttaatcattactaaagtccagtgggttttggtatagtaataatatataaccatcataattaattccagaacattttcctaactcccaaaagaaattccatacccattaaggagtcattccctattttcccttttcttttctttctttttttttttttttgagtcagggtctccctctgtctcccgggctggagtgcacttgcatgatcttggttcactgcatccttgatttcctgggctcaattgatcctcccacctcagtctcctgagtagctgggactgtaggcatatgttaccatacctggctaatttgttttattttgagtggagatgagattttgctatgttgcccaggttgctctcaaactcctgggctcaagtaattgtcccacctcagccttccaaaatgctgggattacaggcgtgagccactctgcccggcctattatctctgttctgcccacttccaaccactaatctactttctgtctctatgatttgcctattctggatgtttctataaattaacttatacattatatggccttttgtgtctggcatcttccacttagcatagtgatatcagtacttcattcggtctttttttatgactgaataatattccatagtatgggcatacacattttaaaaattcattcatcagtgatggacatttgggttgtttcctttttggctgttatgaataatgatgctgtgaacatttgtgtaccaatttttttatgaacatacattttcaacgcttttgcatatatgcctaagagtggaattgctgggctatatgctaattttttaagaaactatgaagcttttgagagtgattgtatcatgggatattcccaccagcagtgtatgagaggtccagttcctccccatccttgctatcacttagtctggctgatctttaacttaagccattctaatagtatctcattgtatttttagtttgcttttccctaatgactaattatattgagcatttttcatacacttattggccatctgtatatcttctttgagggagtatctgttcaaatcttttgcctattttttcttagtgagttttgatagtcatttctatattctgaatataaattatttatttgatatatgctttgcaaacattttctcctagtttatggcttttcatactttccacacagttcttttgaagagcagcagtttttcattttgataaagtccagtttgtcgattcgttcttttagggattttgcttttagtgttttgacccaaggtcacaaagatttgcttttatgttttctcctaaaagttttatagttttaagttttacatttagatttacgattcatttttagtaaatgttgtctattgtatgaggtattgattacagtttatgtatttttcacatattgttccagctccattttttaaaaagactatgcttttacactgaattgactttgtacctttgtcaaaaataaattgactacatatatgtgggtctattgctgcactctctattctgtgttctgtggatctatttgtctgtcttgattggtgtcttgattactgtagctttataataaacctggaaatcaggtagcgcaaggcctcttgctttgctcttttctttcaaagttgttctggctattctatgtcctttgtatttctgtgagcatgtcagcatcaccttttcaacccatatgcctgctgggattttgaatgagtttaccttgaatctagatatcgaaacaattagctgtcttgatagttattgtcaccgttttataccgaagaaactaggcatactaaagtaacttggctaacatcacttaccttgtaagaagtagaactgggctgtttgacatcagagcttattctttataccatttcctatgttaattagaatacaatattaatttcataaaggtaaaggcatatctgttttgttcctatttgattccttgtgaaagcacaatgcctagcgcacaatagacacttaaacttatctgttgaatggacaggtgaatgcttttaaagtctttccatatagaaaattaagtttcattacatttgacttgatctaggttttcatttcatagaatggagagcagactctgtaaatattttgccccagacctagctttattacaaacattgtcttaattaggattctgtctacccagaatagaaattaactcaagctagcatgagtgtatattgaaatttatattaaggataaaggaatgtctcatagatcccactcaaaagaaattagccagcccttaggaagagactggaattgggtttggaaaatacaataggtctttctttttatctgtagtctttagtgagtcttcctcatttttctctctgaagagataagcattctctgcatatatatagcattcttttagattttcgtgacataaagtattatttaaactttcataaggtatcttgattttaagttgtaattccttgagatgattgttttctttattgttaatatgtttcccttcctgtttttttttttttcttttttcttttgtttgtttttacagaggtaaataccggattgtatacgtaactccagaatactgttcaggtaacatgggcctgctccagcaacttgaggctgatattggtaagtgataaagaaagatctctgtaaatacttactgagttaatatttaaagttaaacctatggatggacactggatttcacttctgttaaagtttatttcaaacattacttcctccaggaaatctctgactctctaacttgctgtttcacctatcttatcccatgatactctataattccttttgctatagaaattaggctctgttatcataattacctgtttatatatctgttttcttctgctaggctataaacttttcaagggaaaaatatcactttttaaaatttatgtttccccagtgcagtgcttggcatataggcacttaaacatattgttgaatgaatgttgaatcctaggttctgtgaaattttaatttacttgtttttcatgttctgtatctaaattaagtcagtgtagtggttttgtaccctctttgttcataagaatcacttttcaaactttaaaaaaaatgtaggtaaccaacacccaactctgaaaattctgatttaacaggcctgggttggcacctggcattggtggtttctcacaggtgattctgatatatagcccgggttggaaaccacagtacctttgattagttgccactagtgagtatgatttattacaaaaaccaaaaacttagataagtcacagtttatttcctagaacgtgtaaatatagaattagtcaaaagctgatagcactttttttgtacttaaaaatattttaagcctcagtatagtgagacctcatctctacaaataattttttaaaaaattggccgagcctggtggtgcatgcccatagtccaagctacttgggaggctgaggtaggaggattgtttgagcctgggagatgaaggctgcggtgagccaagatcatgctactgcactccatcctgggcaacagagcgagaccatgcctcaaaaaaaatttttttttcttcttggtggttaggcttaactatccaagaattgcaatcatggcttctattgcaaatgcccctatttcccaccttcagttggcctaaccaaatttaatttttcaatatcatatgatctttttgtataattatgtattcaaataattccagataggttaggttttcgaattgcaacgtctcatttaatggttactttcatataactgtaggaaagcatttgataatttttccaacaatgtaatgaaaacaaacttgtatcttttttattatgtgttaaaaccaacaaaagaatgagggcagcaattaacatttcattaaatatattagcaatgagtacatttatgagctcttaaactcccttattgacatactgtattttttgcctttaatggacaatgaatttgatatgtttcctaataggttgtatgaagttattgtgaatatttcactttggattaagaataactaccctatatataaatttcatggttgtattgcaaaagctggggtctatgtccatagtggtttgggtacgtttttactatttgctttgtttctgtgatagtgttaaatgaataataagcttaagtatttaagcaaatacttaatacttctgacaagtagttagaactctctatttttgtttttttgtaatggatgagttatggacactgcaattattagagcagcgtactttgcttatgatggatgaaaatgttctctggttgactcagtgttgaataaaaagggatacatgaaataaaaattatttttgaaatattttcctttgccttttgttgcgggaaattgtacaatgcttgcaaaaatgaatatacgcaggatattatttgtacagcagtctgacatttagctaatcagattcctcatttttaggtaaatgttaaattacttaagtagtctggatttttaacagaaacagcaaacatagttttatagggaggctccttaccaaccagacttttaacttaagtgaatgttggcaaaagcttgtctaaactgatttccagggataaggtttagctccattaaaagctagtttgtcaaacctgtaactaaagctttttaaaaaatgaaagttttaaaagagaccatcattctgttttaacctatttaatttaaaatctgggctgaagtaggagtattgcttgaacccaggagttcgagaccagcctgggcaacacagtgagaccccatctctgaaaaaaaaaaatgagctgagcatggtacctgttacagtgctagttatgaaagaaagaaagagagagagagagaaggaaggaagggagaaaggaaggaaggggctgggagtggtggctcacacctgtaatcccagcactttgggaggccgaggcgggtggatcatgaggtcaggagatcgagaccatcctggcgaacatggtgaaaccctgtctctactaaaaatacaaaaagaaaaaattagccgggcatggtggtgggtgcctgtagtcccagctactggggagggtaaggcaggagaatggcatgaacccgggaggcagagcttgcagtgagccgagattgcgccactgcactttagcctaagaaaaggaaggaaggaaggaaggaaggaaggaaggaaaaatcagtcactcactcaggtttagtttcaaaagccaaaacagtgataatattgaattttttccagccactcagtagtacccagagaattttgatacaaataactgactttgaccccatgtttagtaggttttttttttgtttgtttgtttgttttttttttttgtctttcttctccacactctcttaggactgttgtagcttgtaatgttagtgaattgtaattgtttatttgcatgtctgtctcctcttttagaattgtgaactcctcaggtcatggattgtattttattagtctttttattcctagaaaagtgtttggataataatagatatttattaaccataataggagtagtagcatttttgtgtgtgtgtgccaggccctattttagcattttatgtgaatgatataatttaatttttagagcatctagaaaatgttaggtaccattattatccacattttacttgtgagaggactgagacttggaaagcttaagtaacttgcttaaggtaatacacatggcagatggtggagccaggttctgcatctgggcagtctgactttagagctttttaatcatcctcctcctagtgtccgaacattattaatgctcagagaagtatcaaagaatgatgatactcattgagggaaaaaattattcttaagtatcaatttgttaattgaggacaaaagcactactgttactactgtgaaaaatctgaaaacattgtcacggatgattttacaataacatccttttctgacatgcattacaacacactattgattccgtttcaatgtttgtgtctggtatgggggcggagtagagaggctactacaggaagaaagaacaaataacatttcttcttactactttgtgcatcatgtgatttagctcctcccataccattttacattagaaaatgtggctgtcctcctgtgctctagtactggcatttcagaggactctttgcaatatgatatgtgatcaatcatggatggcgatgcagttaatttcagtagaaatttgctgactctttttatctcttttaatagctaatgcatgagataaaattgaaggtattaccaaggagaaatgcaggtggatagttttggaggcaaagtcacagtaagcaattcatctctccaaggaatagtgatgaaagctgagatccaataaatgtcttgtttggattaatacataaatatttccttttaaaattcttaaggcttttattcatatatctcccctctccctatttccaataatgatttttggtgttaatatgatgatatttatgcttctgtttttataggaaccaaatactttgatttggttatttattctcctttggagatgtagatgagtttattttttcctttcgagctttatcttttcctttatgtgtttttctttttttacaggtatcacgctcattgctgtggatgaggctcactgtatttctgagtgggggcatgattttagggattcattcaggaagttgggctccctaaagacagcactgccaatggtaagctttgccaagtctgatgtcccgaaattacattcttaataaggagagcattcaggattggggagtggtaaagaagctgaagacttcactataaaagagcaaatggataatgtaaaaagagaactatttttttaaaaatgctaaagttggtatataatctattgaggaatataatagaacaaggcttgacaaaccttttctgaaaggaccagataataaatatttcaagctttataggccacatgtagtctgtatcacatattcctctctctgttttttcttttagtaaccctttaaaaatataaagagttacatttttcactggtgggccataacaaaacaggctgtgggccatatttgtccgaatgtcttctcagtgatctttcatccgtatgtccttttactctaggatgctgtgaaatcctggttaccccttcttgtatcacattgaaaacctaaagtttgaactattctatagaaattttattaaagcttttggtattagaatttccctttcttccctaattataaaaaatagcaaattttggccgggcatggtggctcacgcctgtagtcccagcactttgggaggccgaggtgggtggatcacctgaggtcaggagttcgagaccagcctggtcaacatggtgaaaccctgtctctactaaaaatacaacaattagctgggcgtggtggcaggtgcctgtaatcccagctacttgggaggctgaggcaggggaattgcttgaactcgggaggtggaggttgcagtgagccgagattgtgccattccactccagcctgggcaacaagagcgaaactctgtctcaaaaaaaaaaaaaaaaaaaaaaaaagtgaatttttacatgaatattctacatgattggcatatttacatgaatggtttaaaaacccacaataatagcactgttttattttttattttgaaaattgtagattcacaagaagttgtaaaaaaaaaaatacctatatagaggtcctatgtacctttcatccagtttcctgaacagtaacatcttgtgtgactatagtacaatatcaaaactaggaatatgacatttgtacagtatctagagtttattcctatttctctagttttgtaagtactcttttgtatggcatgtgtattgttctatacagtttaatctcatgtacatttgtgtaactaccactgcagtcaggatgccaaatgttcccttaccacaaagctccctggagctgttcttcccacccctggccctagccactggcaaccacaaatctggtctctatctctaaaatattatttcaagaatgttatatacatggaatcatgcaatttgtcaccttttggaattagtttttttcactcaacataactaccttgagatctatccaagttgtttgtggtcatgtgttgcctaacaacagggatatgttctgagaaatgtgttcttaggacattttgtggttgtctgaacatggacttacacaaacctacatgataaagcttactgcacacctaggctatatgatagagcctattgctcctaggctgtaaacctgtacagatgttactgtaatgaatattgcaggcaattgtaatacaatggtaagtatttgtgtatctaaacttatctaatgtagaaaagacacagtaaaaatacagtataaaagataaaagatggtatacctgtatagggtgcttcctgtgaatggagcttgtaggactggaagttgctctgagtgagtgagggagtggcgagtgaatgtaaaggcctaggacattactgtacactactgtagactttatacatattgtacacttaggcgacactaaatttttaaaattttctttaaaaattttctttcttcaataataaattaatctcagtttactgtaactttaattcataaacctaaaacattttttgactttggactcttgtaataattcttagattaaaacatgaacacattgtacagctgtacaaaaattttttcttccttgattaatgcattccataaggctttattttaaaattttattatttttatttttaaaacttttttgttaaaaactaaaatacacacatatcagactagacctacacagggtcaggatcatcaatgttgctgtcttccacctccacgtcttatcccactggaagttctttaggggcagtaacactcatggagctgtcatctgtgataacaatgccttctcctagatacctcctgaaggacctgcctgaggctgtttttcagttaactttaaaaaatgaatacgtaggaggagtatactctaaaataatggaaaagggtataggtaaatacgtaaaccagtaacatacttgtttattattcatcaagttatatactgtatataattgtatgtgctatactttttaatgcctggtagtgcagtaggtttattgacagcagcatcaccacaaacgtgagcagtgccttgtgctaagacattatgctggctatgacatcacttggtgataggaatttttcagctccattataatcttatgggaccactgttccacatgtgctctgtcattgacagaaatgccgttaagtaccacatgactatttttcggtggtctgttcctttttattattacagagtattccacagtatggttgtaccacagtttaactgatcacctgttgaagaacttttgggttgttttccagtttttgactattatgaataaagatgctatgaacatttgttcatatctcaaaggttctttatttttttttatttatttttctttttttgagacagtctggttctgtcaccctggctggaatgcagtggcgcgatctcggctcgctgcaagctccgcctcctgggttcacgccattctcctgcctcagcctcccgagtagctgagactacaggcgcccgccactgtgcccggctaattttttgtatttttagtagaggcagcgtttcaccgtgttagccaggatggtctcgatctcctgacctcgtgatccacctgcctcggcctcccaaagtgctgggattacaggcgtgagccactgcgcccggccttcagagattctttaatgggtgaatggttaaacaacctgaaaatataaaagttttcatttctctgggataaatgtccaggagtgtatttttagtttttaaggaattgtcacaaacctgttttccaaagtggctgtagcattctacattcctgtcagcagtgtgtgaatgatctagttatccttgccaccgtttgttgttgcaactgttttttattttagccatttcgataggtgtcgagtggtatctcacttttaatttgcatttctctcatggctaatgatggtgaacgtcttttcatatactaatttgcctctggtgaaatttcttacataattggagtgcttgtttttttctgttgagttttaagagtttaaaaaatacattgtagatatgagtccttggtcagatacgtggtttcaaatatttctttcactttgtagcttgccttttcattctttttaccgtgtctttcacagagtaaatatttaacattttagtgaaatccagtttatcattttttcttttatggattgtgctcttcacctagccctagatcctgaagattttctcctgtggttctttcctaaaattgttacagttttatgttttaagtctgtgatccattttgagttaaattttgtataaggtgtgaggtttaagtcaaggttcattgttttcccaatagattaaattgcagcagatcctttgttgaataggctgtccttcccctgttaaattgcgtttgcccctttgttgaaagtcatgtgggtgtatttgtgtgggtctatttctgggttctctagcctgttatattaattttgaacgaataaagttggcttatgtttaagttttcttggtagtagcgaggcaatggtgccttctgagcccaggatttcacaattttgtgagtaaactgtgttagaaattgtttgttattcttttggtaggttgtctagttcaatttcattgctcattaatcttgcttatagatagcaaattgagaggcatctcaaaaatagtatcttttgttagcttatctcacagagtttggttggagcagatattaaaacaacaaaccaaaaataaattaaatatactagttagcaagtttatattgagggaaaatcaaaccatgtgaattgagctccaatgatgtggctggccttgggtcagattttagtatcatggttcaacaaggtagctattaaaatcttcatactttttcttgaaataattctttagtagtcacataggacagcacacactcatggatttcttctttccttactgtctctttattctcagcctcctgttccttctcatctccctgaccttttaatgttggccttccagaaactttagtctttggacctacctttgcactcattttcttggtcatttcacccaacatacagttttatgttattttattttttttatttttgagatggagtttcactcttgttgcccaggctggagtgcaatggcgtgaactcaccttactgcaacctctgcctcccgggttcaagtgattcttctgctcagcctccccagtagttaggattataggtacgtgccaccatgcctagctaattttgtatttttagtagagatggggtttcaccatattggccaggctggtctcgaactcctgacctcaggtgatccacctgccttggcttgccaaagtgctgagattacagatgtgagccaccacgtccagcctacagttttaaatatcaagtctatactgaggactcccaaatttttatctccatcatagactgatatcagcagtatatgagtgattcagttgtttttgcctctttgccagcatttggtgttgtcactattagttcattttagccatttaatagaatatatgtacatatatatgtgtgtatacacaggcacacatctatataactactcaacatgcctctggtgagatgaccaacaggtatctcaaacttaacctcttcctaattgacttctgcatagcactccagatctgctctttcctcactctcctccatcttgtttaacagcagctccattggccaaaattttggaattttcctcaatcttttctctttttcttacactccactgtttatttaaacagtaaggaaatctcgtgaggtcttcagaatatatgcagaattaaatcacttctctcttgatccctgccattccccaggtacgggccaccatctccttagggcctcctgctttcactcttcccatccctcattctgtttcaacacagcgtccagagtgatactttaaaaatgaagtctgatagatcatgtcttcggctcagaaccatctagtagcatgccatttcattctaaataaaggcaaaagtccttatgatgagttaccgatcctcatgtaatctggccttccattttccctctgatctcattctctactggtctcctcattcaccggatgcagccacaccaccctccttgtttttcttcggacattccaggcatgcttcagtgcctgggctttgcgcctgctgcttcctctccctgaatacgtttcccccacattgtctataggatgttctcccatacttctctcagatctcttggatttaggcctcctgggccaccatatttgaaatatcagattagttccccctcccccatcattcagcattcctcgtaaatctttgctgttttaaaaatagcactatcactgtctaacttactgtgttatattttgttaattttctgtgagttcttcttcactagaatattctttgtagggaggagtttttgattgtttggtttataaaatctggaacaatacctggcttataggaggtgctcaatttataatggggtgaatgaatgaatgaatgatgatgagaaagctgagaatcagtaaagtgactttccaaaacaggtagtgggcagtatagagttgggccataaatagctgcaccatacaacatcctgctagtttctaaagcaaatgatttgaaagaggcataaaacataatttctgccctcaggtagctcatagttcagtaaaggagtttagattcatacctataacagtagaagtaatagcaccaaatgaaatatggtattatgaagtggtacaaataatataaaaagatgaacagtgttagtagtacatgtttagaagggatttctgtggtgaaagtcactaggcacagtgcacctggaggaccgatttccattaatttagaatggtttaaagtaagcttttggaaactaggaagattactttctgtaatcctttcctaggcctttgattctagaaggattgtgttaaaggagttttaaatattttatacagttcttaaacattgttaagcttgaattaaatcttttattatgtctggccatggacgtcattggatcattttcatttcttgggaggattaataaagcacattccttctgttgggcctccagtgcggggagggtgttggccgagcagtggctgagaaaacgtttttcccctggtgttttcaagaaccctctttattagctaagtggtgagacatgccacctggtggttatagtagtatcatttttctcactgttcttggtgcttttcttctcgttctgattccagttatactaggacaactgctataaacctggaatgtttcacactatattatttcagtaatttcaaaaacagcagaaatcactaagctgtttggcacaaagattcctatttggaaggaatcagacaaagtgagtgttgagaaagaacagccaggcagaaagctttgcatcagtcttaaagttctttacatttcaagtaagaggaattgtgaaatccataagacatgtggggtttttctattactttctccccagtatctattacaaagatcagcacatagtaggtactcagtaactatttagaatgagtgcatgaatgaatgaagtatgtgtgatgttatggagtacaaagttagaattagcaacatgacctgaatttagaagcaggtgggatacttatacttttctcagtctgtgggcaccacaccattgaagtatatgtctaagattaatttatatttggttgtttgatttagcaaaacttgctgcctgttaaaaaagaaattaagacctgtcaacttaaagaatacattttgtgagttaagaactaaatgacagtataatttattacccaaagcagtttgcttctgaaaattaaagagttcaagctattaataattatgctgtgactgcaggcataaactgggaatgtcctggcaaatgaggatgtattgtcacctttctcagcctgcctgtgtgttgtttttaagcttcactctagtttatatattttaaatgtcataaaataccacatacttataagagaaaaggttctattcattgctgaagtggaagcttatcattaatttttatttatttatttttttttccagttttggaattcttattactttgaacccaagaaccactgataactagcacaatccagtgaaacagaggaagcagcagcttaatcaaaggaaaaatacatttaagattataagtctggttataagcttaaaaagtgacccagaaagggatatcattgctaaaaaaaaaaatccccttgtgacctgggtacattttgcaaagccacaggtttgcagtgttacacaagggccaaaggaggccatgagttgtctttggttgtggggccggagggtaactgttcatgaaaatagtgagtgtctgaagattaagaaaatcatgctgcagcagaggagaagggagaggaaggcaggaagggaaaggagatgcctgagggtcaaaagctgagcccaagcctaagcccaagctcaagttcaagccccagcatggcacaattttgtgaattaactcaggctgagttgcctccagtctttggaatgtcatcttatactggtactgctgaggcagagggcagtaattggttctttgggataggagaaggggcagttgctgaaatacaaaattaatagtcagcatcccaagttcctcaattgcagccaaaatacatgtgttcaggcctttcggcagtaccgcccccagaactaccagctgtagtgtggtctattcccagacagcaacatgcaagaataagtttacaatacactcagcccttgtggcttaagatcaggggctcagaggctgtgacaactcatgatgctgaaaatgtatccaatgaaaacgaagtactagcttgtttagtagtaacgaagtactattaatttttaatatagtctgatactttattttctaattgtagaagcaacattcttagctatatctttctagaatgttgaggcaaaagagtaaatttatagtgattttcactgttaccagattgctggaatagggaatttctggtagcaagatgggaatttttaagttggaagggtctaacacatcatatagccgtctccatctcattttttttgctgaaaaaactgagcccttgcaaatgtcagttgcaaatctgggagtagtactcatgtctctgaagttgttatatagaattctttttatttattttaataacaatatttatgatagttgaaactttttgagtgcttactatattttatttcatgcattatgttcagcactttacatgttttatctcacttgatattcacaactttatgagattggcactgttattgtagccattttatagatgaggaaactgaagcttagagagttaaataaagagctcaaaatctcacatctagtaagtggcaaaaacaggatttcagctcaagcaatctgattccaaaacagacttttttcactgtgctgccattcttttgcctggtttttctgttaacttcttaaatatatgtcatgtttcatgcttacttcctcattttcataaatatattacctgctcacttatacattatattgcttagaaacaaacccaaccctgttttcttatggactgtatcctgaaaatcactgtttttaatatgtggttaaacaagtgttttattagtgcatttatataaattatttaaccaaaacacttaaccggtgaaagtgctttactgtgtgagaatgtgcatgttctaagaacctctaatttttaaacctcccttattctcagccttatatttgttaaaacctgtgtgttaacacagatgcacccatgttaggggttaattagagaaaccaacctctttatagattagcttgttcatctttaagttgctaggcaggcactgtaaattcagagaacaatctgattgtaagccacaaatcaatgaaattaattttggggttgccttttaaaatagtgtcacaaaatttaaggataaagaatgcaaaaatgatgccaattatctcatcacattagttttgatttaatttttttaatttgaaaaaacctactcttaaacttaattgatttttttaaatataagtttggagataatttttaattcagtaaagttatagtgattgaaaaagtagtttataatttttaataaattgatcttgttttaattttgagtcatattctagaagtgcttctttgcaaattggtaaattgcacatacatttccacttatatacaagataattgctatggttggtttgtataatagatgcagtgcatctgaagagctattttatgagaatattgtttcttgtatctgtcacgagccaaaaagaatatttttaagaaagttatattcttggtgatagaacagctgataatttagaaacaactgtaagacagtccactttttctgattatgaaataataccatagttaagtgtaatttcctataatagaataaaaacacgagttctagttttaggggaggcatgttgttaccgtaccttagaatttctggaagatgacatattcatgcttttcctgataactgctgagtctcctgctctgtctgccaatccagtcaagaagcctttgctagcaatcaattaataatacgtttcatttatacatatttcctatatatagtatgttattgattatctcagtaccactgaagagaggttatctgggtcattggagctttgcttctagatttgtgaagccataaacctatatatttaaaataggaggccaaaaaaaaacgaccattgctttatatagttagattttcagtgaattgagagtttatcatttgtaattatacattaatcaaatataaggcataatatacccccctgcttatatcagcaccatttcaaatgtaatgttaaaaaataataaatggagaagtagatagctaacaagtaggcttaatttaataagacaaagtaaatggcatttggaaacctcatggatttaatgttttatttaaatgatttctgatttttaaaaagtaaatattgtttccagaaggctgagaaacaagttagtagggagattttttctttgcaaaaaaattttacagttgtgtctttaacattgtaccacaaactgttgtcctaccagtctctttgtaagaaagctatagacatgttgggaatgaatgagctctttcctttttaaaatatcagttttacatcattcaggttccaatcgttgcacttactgctactgcaagttcttcaatccgggaagacattgtacgttgcttaaatctgagaaatcctcagatcacctgtactggttttgatcgaccaaacctgtatttagaagttaggcgaaaaacagggaatatccttcaggatctgcagccatttcttgtcaaaacaaggtaaggatttaatggttgatgaattttggtaatgatttcctttttttttttttaacaacttatgtattttatgttatttacgatttccttctaatgcatatttaacatatttcaaattccacctagttttggttcaagtcaagcatgatgttatataatcaattcagtgattgagactagtgtatttttaaaagcagaaaccaattctcctaatattttaataccccattctgttgcttaaacagggcatatactatttatttttattttttaaaattttacttatttatttatagagacagggtctctctgtcgtccaggctggagtgcagtggtgtgatcacaactcactgcagcctcaaactcctgggttcaagcagtcctcctgcctcagtctcccaagtagctggaactacagtcttgcaccaccatgcctggctaggacatatacttttaatgattgataagtaaacaagcaaacataaaatgactctttcatctgaattctgtctagtttactaattacatgacttcagtcttaaggagcttagaaaaggtcaccttacaaacacagtggagcctgtattgtgttccaaggactattgtaggcgctttctatataaaatgatctaatttaatccctataactgctcagtaagttacgtattattttcattttattgttgaggaaactggcattagtacttttttctgtttattttgtttaaaggcattttaaatatatatgttaagaagttttcaaaagcctatattttactttttataagcctttattttactatttgagacagtgtcttgctctgtcacccaggctggagtgcagtggcgcaatcccggctcactacaacttccacctcctgggttcaagctattctcctgcctcagtctcccaagtagctgaaattacaggtgtgcgccaccatgccaggctaatttttgtattttttagtggagacggggtttcaccatggtggccaggctgatctcgaactcctgacctcaagtgatccacctgtgttggccttccaaagtgctggaattacaggtgttggccactgcgcctggccagtttataattttaaacattaaaataaatgcttcttgtccaatcatggtgtctcacacccagaatcccagcactttgggaggcagacgttggagaatcacttgaggccaggagttcgagaccagcctgggcaacatggtgaatccctgtctctacaaaaaatacaaaaattagctgggcatggtggtgcatgcctgtagtcccagctatttgggaggctgaggtgggaggatcatttgagcccaggatgttggggctgcagtgagctgagatcacaccactgtactccaggctggatgacagagcaaggccccgtttcaaaaaaaaaaaaaaagcttctaccaatacaaacacaaaacaagcatagacaaatagagtttaaagaacatcattggtgttttcctctaaagggaatattgatgctaggccaagaaaatcctggagttattcttgaggaccttaaggaataattgaaatgtaggatttgctcctggctttcttgtcctatattcagaataaaacaagaatggatcgaatatattctgagtgttctggccattctagtgctctctgaagtgagtactcactgtgtttcacttccctttcatcctaaagaggaaaagttcttttgaagaaggctgtttgtcctaggttagagtctccacagtcagatcattatctcctcctaatctttgatcctgttcagtctctatggtactttcccttataataacactctctatggcactttcccttataataacactctcctttttaaagcagtttgccttttttgtgtgtaatattgttctcctggttttctgacgtcctggtcctcttataatcctatgcaaatgtttctttctgtttttcatgttgactctgctaattgaggtctttgttactttttagccgagactattataatttccccaacagatacccctctccccagtgccccttgttgctttctatgcagtttacaaattattgtctgcaaacacatccttaagtctggaatacctttctggaactccttactaggaaataaagaccagactcagtgtaacattcaacagtattgaagatctaggtatttaatatgaatttttttttttaaggagatcaagaaagatttttgtacccatttttaatcctccaagaagacttaggatagcaggaaaccattgagagtcagaatgctttctacagatcttaggtgaacagaaactttcctcttcatgagcagtgaggtagagggtaattaaggcttcagagcattgcccgttatttccatcttcttcccttcctttaattctgctaaattcctttaatttgtttatcagtattcaagtatttttatccattgagctaaggtgtttcttaaactaaccctattttgttaaagtcttaattataatatattcatagtacatttaagtgagatagatgagtctctcatataatttagtggttagattagattagaattttctcccctcagaaaattaagaggaaataaaagtctgtagcaaatcacttggcaaaataatggctccttttgtaataggaatttttactcttttgatttatctgttacataagttcaaatttttacatattttccaccttttttaaaaaagagtgatatgtagtcaatatcaatttgagcaacactgttgcatataaattgaaaaggactccaattttctaattccgtacctcagttgtgatcactgttggtattttggcatttatgtagacttcctttctctgaccctactactgtgcagatatatagttgcagttttttgttgttgttaagttgatacagaaatagttgcatactatatccattatttatgcaaattttttttcatttaaagtatctgctatctttccatatattgcattttcttaaattagagccttaatatataggatattacaatatctaggttttgttgagtagttttttcttctttgaaaacatgtttttaaaataaggtttttttttttttttttttgacatggagtcttgctctgtcgcccaggctgtaatgcagtggcgggatcttggctcgttgcagcctctgcctcctgggttccagcgattctcctgcctcagcctcctgggtagctgggattacaggtgcatgccaccatgccctgctaatttttgtatttttagtagagacggggtttcaccttgttggccaggctggtctcgaacttctgagctcaggtaatccgcccgccttggcatcccaaagtgctgggattacaggcgtgagccactgtgctggccttaaaataagatttttatacactaaaagaaaacttacatttttcactccattaagtagttcactgtgaatttttgatattgaagcccatttggttgctgtcaaaaatagatttgaacagattattcagtatgactcttgtagtgaaattattgccttgtttcctctgcttaagttttcagtggcttttgccacagtccttaaaggttttataatttttttaatgtttaatttttaaatgtttgcttaatatttcttagtatgagtgtagataatgatgaacatttagatgactttttactattataatgttgcagtgaatatttgtttacatttatcttttggccaataagcaaatatttttgtaaattagaatcctaaaattgaaattggatcaaaagttatatgcacttgaaattgattaacttttcctaaatctaaaatagtatagtcttttttatattgtcagcataaatgaatgcacttatgtaaatgaatatttttaggcgttaagtaaaatattctgtggaaattgaacatttaagttgtttatacttctatggaaatcgtttacgcttttaataaagaagcacaagtttctacaaaatacattctaacagatgttttctataacattcagtctcaagattactagtaaatacttctttgaactgtaaaagcaatctttcaatattataagaaagctcttgctttagtaaacatttagaaactcagctttattatcataagcaagaataagaacagtgtaacaagttttatgcacactcctttgtaaaccctcaccagactaattgttaatctggtgccttgcattccccaaagtatttgtatctgtcgtttataagtttttatcaaggtttcagctaaaacaaataaatttgtttctggttttagctttaatttgaactgaaacagtcaaaactgagttttggggacttcacacaattcatttggatatttgattctccataatgttttaaattttcatgcacttaaatatatcattatttttgataggctttcttcctttagtcttttctttagaaggtagaaaggaagaattaaataagataaaaccaaacgggtctgaagcatgtataaagtatatatgtttgctcttttgttcttctttttctttagttcccactgggaatttgaaggtccaacaatcatctactgtccttctagaaaaatgacacaacaagttacaggtgaacttaggaaactgaatctatcctgtggaacataccatgcgggcatgagttttagcacaaggaaagacattcatcataggtttgtaagagatgaaattcaggtatgaggatcaatcatcattgctctccgttgctcatagtggaagtggatatttctcaaatgtttatttaccagatctttattgaatactttctttgtgttgaacataaagcagtccctctgataaatgtgggagaacaaacttgcagattagtataaatagcaatctgtacctagtgcttaggtgcacagaggagggaggaatagctctgtcaaggtagttgtgtaatgggggtggtccatccaggaaaattcaattagagtccaaacatgtaagtagaagtttttcaagtatgccaggccagtaggtgatgaggggaaaggaattggttatagaattccaggaagaaggactagcaggtgcaaagacactttgatatgagaacacatactgggttcaggaaatgtgactggtatggaatggttggagggaaagacaatgtggggtaggaatggcacaaagtatggacaaagaggcagggtggaaccgttagagacttgagagaacagttgaatgggtcggttggccaggttatagatggctttaaaacttgcaaagaagcagtctgggcttggtatcatatacctgttagttttcactgactactttagccttagaatttttagtttagatacaattttctgtaataggtaaaacggattaaagtagaataactctggctgaagttaatgtgagggaaaaggaggtacaagagtctcgtctctagaccttgaagacactccctgttggggtcttataatccttggagtgccgcagaatcatttgaaaaccatcttgatgtactactctgtgtttttaaataagataataggattatagaaacattagactggcagcaataagttggattgatttgaagaagagaaactgaagaagggaaagggtatcgatgcagctattgtgaaattctacagttgagattcctgacctgattggactggctcagtgggtgtcatagaggatttatttgggaggatttaagttcaaggcacatgagtaggtttaagtcaacaacttgacactgtcaacatgaaatccacactgtaactataagtccgaggaagagccctctcctgaagttaggaatttaacttcagctcttgcattttctgtcccaccggtcatccatttcttctctatccatctccttttctgatatctagttgttatcagtgttgttgaaaagcttaagtatgattcatattcactgtctataaagttcactacacatagtcatgctgtaatgcatacccgcctgaaagcatctggtctctcttttccttctttccaaagataagaataccattcacagctgtttagaatagaaattttatccaaattcttcagtgtttatatttttgttctgttatttcagtgtcttgaatattgtcaaatgacatttattagctactactggtactactgaatcttaataatcaatcttcaagccattaactgaccaatggtttcttctatcttaatgtattagtaattattcatttagagtaaaacatctcccagaacatgaaagaatacaaactttattcatgttacgttgtgacaggagactttgttggatgcgcctgattttcctgccaattcacagcttcattaaaacagtaatgctttgaaatatggcttaggaaacttcacaatgatcattaattacacctaatttctggaagagtatatgcatgtatgtgttgcggtattctcccttgctgtggcaggatgtcacaaatttttatccacattacgaaaatttaaaaattgatatggttttttctccctacgttgatatcagatattttgttttatctgacagctggcccaatgtactcctactttgccattataaagaattcaaaagcttcatatttgcattgaaagttctcaaacactttgtaaagatgatgaaagtatgtttcatcatctatgtagaatagtcaggtgttcttgcaattgattacttgctaccgagaattgaatacctactgagtgcataatgtatagaattctagatattcacttttgtgtgtttttacagttgttatataccttagtgtggctctaaaagtggaggtgacagctgtagctcttaatgtcttacactgagtgatgtttagaatcttaaattttcttttataattttagaaaaaagtatacttttctttcttatttttataaccagatccaaacacatttgcatgtagataggcatttttagtcttgaacattcatttttacttttaatcctcacttttattagtttcgtatctttttgtatttcatttcccctttcaagatgccttgagtcctttctttttaggaatgatgttgtgaataaattatttgataaaatgtctttacacctgagagtttataaggatagtttgaaaatcatgtctgtaaaataggttgatctcacctaaaaataataccatataattaaaattagaattattattgtgttgcttattgactcttacatatatcaaaaaattgctgagtcttattcagccagagcttttacttagtatgatattcattcctatatttacttttttctcacctttctcatactttcttttacttactcagcattttcctcctttcctccctcctttcttttcttctttccttcttttctcttcctttcgtattcctggtccatcttagcatgtaatctttctttatgaaatggcatgcagataggtctactgttcttacagtaaaaaacttcaaggcctcatgtctttcccacttctgtttcccattcacaacctttttagctgattcttttggtactttaccactatatcttgccatagtttatgtacctggctcctacttaattttttgtttatttgtgtattagtcgtaggcattatttatcgactcttctctctgaaagatgaaaggttagctctctttcacattcttaactgcccttttttcttaccttgtccatgtatttctaaccccctttcctcctaatatgtttatgtcataattttggctagattagtgtatacgatttacataattattactctgtaaatgctttttatgatctctgagccatgtagtatattatggctatttttctttcttatctatttgtatttttattgttattacctaaaaaaaaattttctatgtcttatcactaattcttccctaaaatttcccacaattgtgtaaacttacctcagtatattcatagatatgagacattctatcaattttaccctcttaaagatgcagagataatgcattatgtttcatcccaccatctttaatgagaagcttccatcttagattaatattagagaatgttaaaatactctgcaatcaggtaaggacgcttgaaacttcattataatgcaaaagttttctttaacacaataaatattttgaaccccttttgtgtcttgtattcataggagttcagatagaccactttatttactattttttatagagagtgaacagaaatcccatttctagtcaccagtccttaatctgtaaatcaggcagataatctgtaaatgattggttgaaatcacattgaattccactttgtgccagggacttaagttaacgaacaaattattcttacaaaaaggtataaatgtaaggttttcattctgctaaatatgtttgtcaaactgtgttgtgatttgttctcagtgtgtcatagctaccatagcttttggaatgggcattaataaagctgacattcgccaagtcattcattacggtgctcctaaggacatggaatcatattatcaggagattggtagagctggtcgtgatggacttcaaagttcttgtcacgtcctctgggctcctgcagacattaacttaaataggtaaaaaaaatttattgtttttactcttgcagatttctttctttctttccatataaacctcaaaagtgtttgaggctatttccagtatcccaagtaatttgtgagtgcatttaaagtaaaaaaaaaaaaaaagaaaaataaaacctccccaaatccagaggacatgtaagaagaacatttgtggtaagagttgccacttggagatgagctaatttcagcatgccttagttagtgtgaggaattaactaaatcaggacaatacttgggcctgtcacagagatcctatggaatactttcctaccattgtgcattaatgaacaggttcttttcctctcctcagatcctgtcaagttgcgatgtcttcagccatagttacttcaactaccactgattttgttactgattctttcttcccatgctacagtggtgattattccagaggatttctctcagtccctatttgactcttgttactatttgttttcttggttagttccatgagaccatgccagttctccttgactgtgtatgaatcattgtgttgcactgtactgacagactgccgtaagtcaatattaagtgttcagtatctaagtgcaggagaacctttctacttaagtactcaacaagtagtttgttggcacttaagttctatgagattttttgttgtaaaggaaaacattatcttgcaaagattttggggcagcatttaccaatactttgttccttcatccgtaggaaaaagaatctcaggagaaaaacctatacatggtaaccaatggggctgccaagctgatgaagtattttcagagtacacctttgtgtagctgaataaattgagatcttgaatggacatattagctcattttagtaaaatgataagagagtgcctcccactacagtttttgtttttatgcatcattaaacaatgtgtttttgattgtccactgtgttccatgaactatgctatgtgtgggagatatagtagtaaagaaaagcaaagtacctgcttccatagaattcagtataatgggaatggtaattctttagagaatcacataactatggatacataggcttcattttactgttctccttttgtgtttgaaaatgtcaacaatcaaaattttgtaaaaaaggaatcatgcaacatatttaaaattataactgtgttaagtgtaatgaagggaaattgcactgagtagtaagaatatataatggtgtgtggtatttcccaagttaaaaaggtcagataaggcttccttgtggaagtgatagttcaaatctgaaagaagaataggaattaattaggtaaaaatgtttgatgcaaattttaagattttccttctgagtagtcagtagcttttccttcttaacatagaagatgacaaaaccatcctttttttgtacataacaattcttgttttcctttagacagttgtatctgtcaagcttcttatgatctaatttaaataattgggatagaacacagctgtacatgttactattaaatatggaatatatcaaacataagttgattcctaccagttctgattttatttgtgtattttgttaaaggtactgaggacattaatatccagttttatattgtgcatttgaaggttcatcaataaatacaattcttgtttctctgggtcttaaaagatattttaaatggttatctcattaagatttaacaggaaataacagtgattcaaatcaaatagtggtgccagaaacccatacttgaattttgggtatagacaggttaccctttgcatcaatcctgaggaaactaaaactataggattaatcaggataaaaaagaattgagcaaggattcaggagggatctgtatcatcctggtgacaaccctcttctagaaaaaactagaaagtctaagaataaatgaagttgctggttctcacctggaaaggtcagttactcacaaaatttttagagtctatcttatgccataattctatcactgagagaagaaacttgtccagtcatcatgtaatcttcatgtaaatttatgtttttaattgcagaattcataccacaggcaaagtcccaatgtctgcatttgctgttaccttaaatagtcaaaccccaaagttattgtaatctttttttaacagagaataatttgcagagtaatctcggtccggtagatctttcagtggatccaaatgattgccatgaatggtttagaatttttttaattttcaagttgtttttattctgtggaatactggacttatttttgtagtcccaaaagaaaaataaatatttatttatttgccgttaagagttgtagttttgttttctcaaatttgtcctgacactgacgagattagttaaatgtaggtcatctgaaccaaatacaaggaaggaaggacccagttctgaagagtgtgggcatttcttttcttgtttttttttttttttttttttttttctataggaggggaacgaggtgaactaaacaaacaaaataaagcaaaaaagaactgatttttatcccttgaggtagaaagaatgagattacagtggacccccttgtctgcattttcactttctatgttttagttactcacaaccacgtccaaaatgttaaatagaaaattccagaaataaacaatttataaattttaaatcagtggtggctttgagtactgtaatgaaattttgtgccatcccactcagtctgcctcgacttcccttagaatcatccctttgtccggtgcattcacgttgtatttactccctgtctgttagtcacttgttgcagtatcacagtgcttgtgttcaagtaacgcttattttacttaagaatgaccccaaagcacaagagtactgtgcctaatttataaattaaactttttcataggtatatacatataggaaaaaacataatacatacaggatttggttggtactattctgcggcttcaggcatccactggacgtcttggaatgtatcccttgtggataaggaggaactgtatatggttaacctaggagctagagtcaacagttggaagagactttggggataattacatggaagggcatggtgggtggtcgtttcagatgacaagaatgtttttgaataacggatcatttgtgtcttcagactttccagaactccttgagaattatgcagaggtatttaatcagtcagaaggttgaatagtcaaattattagtgagtgaagtctattttgatgaggattttactaatgctgtcccttagatattataagtaaatcgttgttttcttttgaaatatctgaaacctagttaacatggactttcatttgttcttgtaaagatatgcaaagctatttgggagattgtcatcatctgatatttgatattcatgggctttcttcacagaagactagaaattaacagagtcatgatgaattatggctgcattgactttaaaaaacaaacacctccttaatgttatttaacaattttgaataaatttgatatggcaaacaaatcagttataatcgattgagaaaggaacttaattctaatacttgactggtgtcccataataacccataatactaagagacagttttggagggcgagaagtcctgaagagctgatagagataaaggttcaaatttgagcttctttcagtgttccttacgtcaatgcttttagtttctcatacaaaataaaataaagaataacctttttactgggaaaaggtaaaaattaataaattgtagaagcattgtttgaagccaaaaagtgtgtgacatgtaaattgaaatgaaaaaccttagagtttttgatactttttcaaagcagctaaagaattgatacttggacacaggaagaattttttttcaaaagcaatttttataaaatcagaaaaatgtttacctcttgttgggggcattgactggaaaggaatacaacagaactttctgagatgctagaaatgtttttttatcttgatggggtgtgggttttgtagataatgaaaaataaacagtaaaaaataagtaaaaaaaaaagtaagaaagttgccaatacagttttacatattcctgtgatgtttttaatcgacaggcaccttcttactgagatacgtaatgagaagtttcgattatacaaattaaagatgatggcaaagatggaaaaatatcttcattctagcagatgtaggagacagtatgtattatttattttatgccaatagtatggatttatggatgatgctcttttaagacaacaatttggctaaataattatcagtattttgaaaaaatattttgttgctgttacatgtgtgctgaatttttaaggctaacttctttgtgtctgagtaaactgaagtcaaataatgaagtcccaagtgaatcaattaatggtgattttacctcattattttcaggaatgaacttaacatatacgtttctgttcttttatttaatttaaaattttgtcttgggtagaatcatcttgtctcattttgaggacaaacaagtacaaaaagcctccttgggaattatgggaactgaaaaatgctgtgataattgcaggtccaggtaaagatttcttattatagatggacattctaaaagtctttctttctcttccttttcatgtttaactgaatttttgttgaatgataagtatttcagttttttaaacaaaacaatgaatgtgtttagatatgagaaagcaaacaatattaaagtattttgcttaaaaaatagataaagcaataaaatggtagccctaaatctaaacatatcaatagttatgttaaatgtaaatgatctaaaatattatttaaaggcgtaaattgtaagaattggtttaaaaacatgaccctgttctgtacgttgtccacaagaaatccactgtaattatatagataggtttaaaaaagaatgaaacattacattccatgaaaacattaatcaaaaggaagttggagttactttaatatcagacaatggacactttggagcaaagaatattatcaggataaagaaggatattatatgatgtaaaagaatcatttcaccaatgtatcagtcagggttcaccagagaaataggacgattgatattatggagatatatatatatatatatatatatatatatatggggagggaaaggaagaacaaatatggggagagagggatgaggcgactgattttgaagaattagctcacgaaattgtgggggttggcaagtctgaaatttgtagagcaggtcaataggctggaaactcaggcaagaggtgatgttgcagtcttgaggcagaatttcttctctagcaaacctagtttttgccctttagtcctgccactgagtggatgaggcccacccacattattgacaataatctcctttacttaaagtcaactgattataaatgttaatcacgtctacaaaatattttacagcaacatctagattagtgtttgaccaaacaactgagcatcataggctagccaagttgatgcataatattaatcatcacaaccaagaagacatcatcctaaatatatatatatatatatatatatatatctacttaacaaaaagactgacagaactgaaaggagaaatagagaaatctacagttacatttggtgacttccagcatctctcaataatcaataaaactgacagaccaaaaaatcagtaagaagacagaagaaatgaacaggattatcagcatgctggatctcattgacctttttagaacattctacccaacaacagtagagtacacattcaagtgcagatgcagtattcatgaacatggatcatattcagagtcataaaacaaaccttaacaaatttaagaatcttgtatttgtatattttttgactagaatggaattaaactagaaaacaataacagaaagataacagaaaagtctctaaaccttagaaattaaataacacacttataaataaatccatgagtcaaagaggaagtctcaaggcaaatcagaaaatgttttgaactgaatgaaatgaaaatacaaaatgtgtgagatgcagctaatgcaatactgagaaggaaatttatagcattaaatacctatgtaataaaagaagaaaggtctcaaatcagtacctaagcttacatcttaagcaacaagcaaataagagcaaaataaatcaaaatgaagtaaacataaggaaataacaaagaacataagtcaatgaatagaaaagctatggtcataccactgctgtccagcctgggtgacagagtgagaccctatgtcaaaaaaatttaaaaacaaagcagcatgcagcattcattgtcagtgaatagaaaatgggaaaacaatagagaaaatcaactcaaaagctcattctgtataaagatcaacaaaattgatataaacttctaacaagactgacggaaagagaaaagacacagaagaccaataccaggaatgaaagagggaatttcactacagacctcccaggtattactagggatgataagggaacactatgaacaactcagaacataactttaataatttagatgaaatggatcaatttcttgataatctcaagctaattaaacttacagtgaattagataacctgcatagtgttacaaccattagagggattgaattctatgttaaaaatctctgaaaataaaatcccctagcccaaagaatttcaatgacaaattctaccaaacatttagaagacaaaataataccaattctatagcatgattccatttatataatagtctttgaaacataaaactatactagagggatgaagaaaagatcagtggttattagagattgggggagggagaaggtatgattccaaaggatagtacaaggcagtattttggagtgatagatttatcgtgccctgattgtgatgggagttagatgaatctatggatatcttaaaatgtgtagaactttacacatacatacaaccaatttgcctatgttaattgaaaaaataaaataaaaacaaattatttacctggtgggttagctacgtacctaagttcaatagctgcgttactgtaagacaaaagaagcattattagggatggagttgttctctgtgtaatgacaaatacttcttcactaagaagacagaattgttttatgcacctttaaaaaaaaacaaaaacaaaaaaaatacaaccaacaaacagtaacttgctggtgcggtggctcacacttgtagtattagcactttgggaggctgaggtgggaggatcacttgagaccaggatttttaagaccagtctgggcaaaaaaccgagactgtgtctctacaaaaataaaaaataaataaaaaaaattagctaggcatagcattatgtgcctctagtcccagctactctggaggctaaggtggaaagatcgcttgagcctggaaggttgagactgcagttgcagtgagccatgatggcaccactacactccaggctgggcatcagagtaagactctgtctcacataaaaaaaataataataatgataaaaactagtctgggcatggtggctcacacctgtagtcccagtcctttggaaggccgaggcaagagaattgcttgaacccaagactttgagaacagcctgggcaacatagcaagaccccatctctatttaaaaaaaaaaacaaacttaaaaatccagcaaatacataaagcacaaagccgacagaagaggtggagaaatcaacaaatccaccatcaaagtgggagaatttgatataattttaagttattggtagggtaaacaatccaaaaattagtacactgtagaaaatttggtcaacatagtaataagtttgcttattactatttatcagtatacatagtatactgatttatcagatacatagtatatggagccctagagcaagcaactatagcagtgtatctcaagtatttttacttcatgacccacatagcaaatgatatgtgtatataacacactgggctaattgtcagagttcagtttctgtccaaaaccctaagatctggagtgattaacctttcagcactcttagaactcacttgtttgtagcacactgattgagaagcactgaaagacttcactcctcaaacatacatggaatatttctaaaaactatgtattgggccgggtgcagtggctcatgcctgtaatcccagcactttgggaggccgaggcgggtggatcccgaggtcaggagatcgagaccatcctggctaacatgatgaaacgccgtctctactaaaaatacaaaaaattagccggatgtggtggcgagtgcctgtagtcccagctactcgggaggctgaggcaggagaatggtgtgaacccaggaggcggagcttgcagtgagccgagatcgcgccactgcactccagcctgggcaacagagcgagactctgtctcaaaaaaaaccaaccaactgaacaaacaaaaaaactaaaaaacaaaaacaaaaaaactatgtattagagcatgggttggcaaactatggcctgtaggccaaatctgcatgctgttttatttttttttatttttttgacatagggtcactacaggctgtcacacaggctggagagcagtggtatgatcatagctcactgtaacctcaaattcctgggctcaagcaattctcttgcctcacctcagcttcccaagtagctacaggcatgcactaccagacccagttaattaaaacaaatttttttttggtagagacagtctcagtatgttgcccaggctggttttcaaactccttgcctcaatcagtcctcctacttcagcctcctaaagtgctgggattataggcatgagccatcacgcttgactaatgtttttgtaaataaagttttctcagaacacagccatgccttttgtttatgtgttatgtagggctgcctgagttaagtagttggctgcaaagcctatcatggcctataaagcctgaaatacttactatctggtcctttatagaaagtgttttctgaccctgtactagactagcttgtctcaaaattcttcaatgaatttggaagttttctcaccacattttctgaccataatgcacttgagttagaagtaaataagcagataaacaacaaaatcctcatgcatttggaaattaaaaataacacttaaataattcatattcaaagaaaaaatcaaactggaaattaaaaaaaattttaaacctacagataactacattaatatgcattaacatttttagaacttagggatagttacaatgatatacattaaaactggtaagaggctgggtgcgttggctcacgcctgtaatcccagcactttgggaggccgaggctgggggatcacgaggtcaagagattgaaaccatcctggccaacatggtgaaaccccgtctctactaaaaatacaaaaatcagctgggcgtggtggcacgcgcctgtagtcccagctacttgggaggctgaggcaggagaatcgcttgaacctgggaggcggaggttgccgtgagccgagattgggccactgcactccagcctggcgacagagcgacactcttgtctcaaaaaaaaaacaaaacaaaacaaaaaaaaaaactagtaagagggcccagtggctcacacctgtcattctagctctttgggagactgaggagagaggatcagttgaggccaggattcaagaccagtctgggcaacataacgagaccgcatctctacaaaattttaataacaacaacaaaaaaaactggtaagaggcaacattgaatagtactttgtgggagtttattagcttgaaatactcataatagaaaagaaaattaatcagctaagcatctcactaaagagattaggagaataaacctaagcatagtttttttcccccaaacattattatatctggaatattgaatgcattcttattgctatttcaaagatacttactctaaggaaagcaattgaattaggtagttgaactctatagtagattttctttaatgagtccttttgttctcaacctacttaaataattctcatttgaatttatgatagtttcagatctacccaaagggtgacttaggaatttaacttctaaatctatttaaatgaaaggtttataatctttttgtcatattttacagtcgttagcgtttaacaatttatagcataggatttgggtttttttttttttttcattttaaagaagaagtttatttaagcaagacacttgactaagggaagactatcttggagttattattactagagtaatttatttctacttaaagacagattgccccacaagtaacagctacataaaaacagttgtaaaattgtccttggttttacaatgataaatgaaaaacattaaaattctctaattgaacaaggtatgcaaggatttttatattgttttttgctaaaactatgacagcaaaataacatcctggagtataaagataagagctgaatgagcaggccactaggggacaaagggagtcttttcacagaaccaatgcttcttttgcccaccccatctccatcgaagtcaatctaaacatattattggccatttagttaaaaaaagaaagaaaagaaaagcaatatgcttgtggacatacaccagttactttatgtgcagtaaaagagtaggaaggggaaggtgaaagaatagagaaaactatgtagtcaggatgtggtggaaccaaattgcaactttctttttttttgagacagagttttgctcttgtcacccaggctggagtgtagtggtggcccaatcttggctcactgcaacctccgcctctcagattcaagccattctcctgcctcagccttctgagtagctgggattacaggtgcatgccaccatgcctggctaatttttgtatttttagtagagatgggttttcaccatgttggccaggctggtcttgaatgcctgacttcaagtgatccacccgcctcagcctcccaaagtgctgggattacaggcgtgagccactgcgcctggccaaattgtagctttctaattgagactgtcttcttggtctggaagagcagagttctgcagtaaaataacaggtcccccttttagtagacatctccatgtctgctgctggaacacatcagttttgtcttaagcctcacttccaaatgtgcagatgtgtctggttcattgattggctgcctgtcaaattgaaacctgatctgcctcattggcaaaccgtgccccttacaataggctttcattggtttactaagcggtgtggtgcgtggctgttcatcttaaactgcaccacagtttaagatgaaccttcaaatgaacattatccttgttctcagtcttgactttccttgggctttttgtggaccctggtgagtgtggcagtctcctcagctgctgcttcacaaaagaggtaccaggtctgccccgaatgagtgagcccctaaacaggaccaggagtggcagaagaaagaggcagcaactgagatgtgttttttctaagctgaaaggctttttttttttttttttttgcaacacacctttaacactaaagtccaatatttatataattggtcaagtaagtggagctgttctagctataaatatggcaactctgcttgctcgtcctattattgacattattcctttctgtggtctgaggtgcctcccatgaaacttgcttctaggacactaggattgagaaccatcagcgtaacatatctgttacgctacaatagtttattttcatattttagctactttacatactcgggtataatgaactttattcatagcttctgaagcagttggcacatttgagatattttttacttggctaattgttatgctaaatcttttgatttctaaagatacatgcctttgctaagctttcttcaaatgttattatttttatttagattggatcattgctattccatggatgactcagaggatacatcctgggactttggtccacaagcatttaagcttttgtctgctgtggacatcttaggcgaaaaatttggaattgggcttccaattttatttctccgaggatctgtaagtatatatctgtgaattcccttcatagatcttcttttacttctattacacttttcttcagaggtttgcagtattatgattgtagctttgacttcagatgggtgactaggaactcatagagtcttactaagttccagttaaacactacattcattactttggataaaacccgtgtgtatggcatcttctgctgttttcatgttcaagccgatgttcagctctgcagctcagtctggaagcattgtgttaatttatcacattgcatttgggtgaatccctagactagtcttgcttaggataattaggaaaagttaactttcattgtatcaagggacaggtagaacaaaattgtccttttgtccaggaaaccattaaattcttcaaggaaaactttagttatagggattattttttaaatgtctaatttcagtaacaatatttgggacatatttatttttccttctgtttcctatcagaagtatttaaagttataagaaaattgtggtttttgcctttactaatgaataaataatcaattaaattcagttacttttttttggagtgattgatgttccagtattcttctaaacaaccacgggtacaaatgtgaataagataggaccgttgcagtccaagagcttgttctgtagtcctttcctttatatgattttttcccctgatttagaagtctataaagcaaagctaagtattacacactgataatggctgaataaatcaagagcaagagataggatactttgcaaatatgcatatttattaaaaatgtactttaaaatagagattaaaattctcgtattgaatgtagaataggtaagcatttatttgtgaaatactcgaatgcttcatgtaaatactttctgagtttgtatttttagaaaggaacattttggaggctgaggcaggagaatggcgtgaacgtgggaggcggagcttgcagtgagctgagattgtgccactgcactccagcctgcgcgacagagcaagattctgtctcaataaaaaaaaaaaaagaaacatatttattaaattagttgtgaaatatttttaatgaaatatattgaaaacttctgttgatttttcatgtactgatgtttttagattctaaatggagtttaaaattttgtttgtaaatcacaagttggattagaaatttaatagtagaagtgttgcctaaggactattttaggtgctgtgagtgaaactgtattttttataacaagaattttagttgtaagggacagcttaaatataattgagatctgtgaaaatgtattctgtctctatcaccttcagaacctgtgtatctcagttgaatgtataatttataaaaattattcttgttttaatttggtgtaatccagccatatccagtatcaacaaataagtctaagtaggctccttgacaaacttgaactggccacaagagagatcagatttcacctattaaaaaaccaaatcagaccacttacactgacagtctcttctgggagtcctcaaattaagaagtctatcctttgtgaaatattacactacccttgctagataaaacttttctaaaagtaccacttaatgaaaatctgtagacactaaatgcaatgaaaataaggcattgtttttttttctccccatttcagtgatcttggtatcctgggatattgtttttaaaattatcgttataattcctttgagaatttagtgaaatgttccctttaaccaacttaggaaaaattaatatctttgtacatgattttgagctgtaaaataaacattttaaactgggaataattggagtttagttaaagagataatgtatataaatatataacatagtagcagcatataattctgtcttacacaagatttttctgaatagtataaacagttatgtagcctatctaggagtttgtgaatagagtttaaaattttgttttgaagctgcaaatttgattagaaattaaacagtgaagttattacttaaggaacttcgttttagctgtctgaacaacttactgtataaaaatctttaaacattctgtataaatatgtgataagatatgcaatgaccttaattttatagattagaaaataaaaacacactcattaatttacataactgacagattaagtgaaacttctcttctgatcacgttagcagaatgccaaatcttgtcgtggcactagaattagacggtagttttgataatacatgatttgactatagacatttgttgaaactattggtagttttaatcactcttgtaattttcaaactatctaacgggagaggattatccatcctgttttctagacaaactgtttcatctgaatgaaatatattcctagagataattatcactacttcatcttttggttttattttgcacatagaattatagttcacaatgactttctgaagctctaaagttgcagctgtgagcttctttggcctgtagggactgggaaaaagcacccccgtcctcccccaagcccccccaccaaaaaaagttaaagtgtttttaacaatagctgtgggctttttgtagtttcagaacttaggagttgcccaggctggaatgcagtggtgtgatcatagcttgatgcagccttgaactcctgggttcaagcaatcctcccacctcagcctccagagtagctgggaccacaggtgccaccccacccagctattttttttattttttaatttttttgtaggtatggggtctccccatgttgccctgcctgtctcaaactccagggctctcaggtgatacccaccacccttggcctcccaaagcaccgagagtcactgtgccaggctgagtttaaaatttcttgagttggagtttatggctattttttccactagttattaaacatgtatttttgtataaggcactgtattacattttgtggggggattcaaagctaaattagatgagacgcatcatctattatggaagatgttacttaagaagaaatgagtgtaatgtagcagagaattagataagggacgtatgaatacatataaatgctgttgaagttctgaagagagagagtgtttagagaaattagaggagtctttgtgaaggtatcactagaacttcctatttttgtggaatatatagtagattttggtgtgatactgtggatttggacattcactcagagaaggaatgagggaagaatggtggagaagaatggcattcacagtacaaaaagcaactgtgacttttaaagaagttaatatggagaagtggcaagtcttttcttctctcttctcttctcttctctcttctttttcttttttctttttttctctgtcagataccgttgtaaagactttgcttttaccggaaactgatacgttgggtcatgtaccctggccagtcagttctctttattctaacacttagccgatcagttagatttccacattccatgatatgtcagttttggtgacccttatttttccacctggtttataaagggaaagaatgtgatatgtcacccaggctctggagtacagtggcatgatcataggtcacagcagcctcaaagtttccagttcaagcgatcctacttccttggcttcctgagtatgtggcactacaggtgcatgccaccatgcccagctaacttttttgtagagacagggtctccctatgtttcccaggctggtcttgaacccctgacctcaagtgatccgcccaccttggcttcccaagatattggcattacaggcatgagccactgtgccggcctgaaaatttctcttttgagatggcatcccacagaagtatacctgcttagagctaacactggtaaaaagactatttaaccctattgccttattttactgtagttgagattgagttaaactgaaagctgaatgacctgtcctaggtcatactgttactttgtgccagagtcaggatgagcaaatggatttcctgcctgctagtctagtgtcttttctatttattgtgctgtaacatacagttttaaatttgtatttttatgcccaatggacatggtagctcacacctgtaatttcagcacttttgggaagccgaggtggggggattgctcgagaccaggagttcaagatgagcctgggcaacatagcgagactccgtctctataaaaaaaaatttaaaaattagctgagtggtgatgtgtgtgcgtgtagtcctccttgtgggaggttgaggtgggaggatcgattgaatctaggaattcaggactgcagtgagccatgattacaccactgcactccagcctgggtgacagagcaataccctgtctcgaatgaatgaatgaatgaatgaatgaatgaatgaatgcccaaatccgtaagctatgttctgtatagcagctttttcatcataggcagtttttactcttatcagtggacaacctacaaaattaactaaacacttaaacaattaacagaggaggccttgttcagagtgagaaatcattaagcatttgttgttgaaatttcttactgtactctgttttaattctgtttttttttttttttaatgttacttgttttagtttggattcctagttgaaaagggaatatgattcctttaaaacaaagatactctgctttaaagcaaaggtatatcatcctcttcatggtgattgccatggaaacaagacaatgtaaatttattcaaatagtacacagtttttatagttattgatcatgaggggaagggacagttaatccctactgatcagataaaacctcattgtttcatactaataaatggtttttttatgcttatgaaaggaaaagccagaagtgtaatttttagtgtttagagagctagtgattctagttagggaacttaatacctttgaagttattagtttgcaagcaatagaatctactactaccaaggtgacccctagcagatgtagagtaccattaacaagtgttccagggaaggaaagccaactagataccaagtcatgctttttactcttagattaagaaattcaggttgagttaaaggatcagctgttaactaataaaaagcagattaatattacagagccaggctctgtcctggttatggacttaatcttcacagcatcctcaagagataaaaatgaatatacctgcatattagatgaggaaatagaagataagtaacttgccagagctatgacgtgaactcaggtaatgtagcttaagagcccccacatgtatgtatattgggtgtgtgtgtggagggggtgcgtgtgagtgcttgtgcatgcgtgtggtataataagaaaaaattagcatttatgcctgtaatcccagcactttgggagaccgaggcacgaggatctctcaaccccaggagttcaagaccagtctaggcaacatagcgagaccctacctctacaaaaaaagttttaaaaatattagcgggcatggtggaatacacctgtagtctcagctgcttgggacgctgaggtgggaggatccttgagtccaggagattgaggctacagtgagctatgatgacacctctgcactccagcttgggtgacaaagagagaccctgtctccaaaaaaaaaaattagaactagttatctggaggcctgtgttctagtcctagctttagtacggctacacagtgacacattaggctaccatttaacatctttgaacctctgataatttgttaacaatatgggtaaaaatgactaagataaatcaaagagctccagcattccctccagctctgaaattctatgatgttttatcttattttacttacaaaaataaattatattatgtatatttaaagtatacaatttgatgttatgggttacctatagtaaaatgattactataatgaaactaattaacatatccatcatcttatattgttaaccatttttttgtttttgtggcaaaagcagctgaaatccactcatttagcaggaatcccaaatacagttcagttgtattaattgtaattctcatgttgtacattcgatctctagacttgtttatgctacatatgtttgacttttaaacattctactcaaatcaaccctaagtcagggttagcacagacaggacttgttaacaaggtagaaggtgccacattgtacctgggtgtttatatttctctaaatcttgttctgatcatattttaataaatataatcatcaggacaccaaaattcattccttagctattaaaaaattctattctattttattgttaagatttaggagagcatggtacagattctcttaactatacctatcagaagcctatgttttaagtccaatgtataggcactgctctgtttgtctctggtgggaacttaccctgctttacctaatttcatcctagcttcctttttgtgaaagatcacccttgcttagcctattttttggcaaatctacaccttggaaatagtagtaaatgacataagcatattaatatttatgatgtgatttatttttgttttcaagtcatatactggggaagattctcaaatattaaaacaatgtatctttacatttatgtatgtcgttcttgttctgttttagaaggcttgtatttgcatttttaacattccaaaaggtaaacctgtaatcataatgttttcatcaattcaataaaaccattacgtttgtaatagagagccctatagttgccttagttaagtttgctgcaactcattttatatattcttttaattttgatccctggatttttaattgattattaaaccttcattaggatatatatgaaatgtaaaaatattgagttataatctaccgttttctaaaattttatactgcatttttatatagaaattcaaattgctcataatcattctagtgaatttaagtagaaaggtatttattactaggtattaaatggcttataatattgttgacaaggttccactgcaaaatagttcaccaagggagctgtggcctcttctgtgatcaagaagccatctgtcaacttgggaagcttccactatagcacctaaccccagactacattgagtaggaagctgtaataatcaggaagcttctacctttgcatgctctgcaaaccaacgtgaacctgctgtaatttgtaaccacaaaatggatgcctgttgatacttacgaagctcatcattgtatgctgggttctttgctaatactttcttataaaaattaaatacctccacaatcatgcatgctagcagaaacagcagaggagtagccttagcctcacttcctgcttatacctgtcatgcaaatatacagaacccagaaccctagctgaaagggagtttgagaactagtatttgtattgtcccagattctgcagtggaagaattcatagtggatggaagttagaatgacccttgaattacaatcggccacattcatcacaaatacattaaataagagtaatttgccataaagctctatgtttgtatacttctttgttttttttttttttttttttttttttttttgagacagggtctcactctgttgctcagtctgtagtgcagtggtgtcatcatagctcactgcagtcttgatctcctgagctcaaacgattctcctgcctcagctcctgcttcagcctcctgagtagcggaacaacaggtacacaccaccacactttgctaattttttattttttattttttgtagagatgtgggtctcactgtgttgcccaggatggtctcgaactcctgggcttaagtgatcctcccaaagtgttgggattacaggcatgaaccactgtgcctggcccatatactacatatatttaaaagtagtatttaaatgtgtaggatgaatgaaagaggcagtaagagaacaaagtgaatgaaaaagtatttctatatgaagtgaaagcaggagagtcctctctgttagagaacaacagaattgcatatgacagactagctttcttaatatttctagaacttgatggctgtgaagagcgtcccgtaggaattctcccttcacttaggaaaacatacctcaaaaccatcagctgtttagcatgcacctgcttttcctggtatatctcagtgaagcagctaaattgtaaatgattaagtaaactttgcagtgtatcatgtgcaaaagcacagtaaaaacaaaaatgcattggaagctgtgagttgttgcactgcactcatggatgaatagctgttggttcgcattgcgtttttttgttttgttttgttttgtttttttgagatggagtcttgctctgttgcccaggctggagtgcagtggcgtgatctcggctcactgcaagctctgcctcccagattcacgccatcctcctgcctcagcctcccgagcagctgggaccacaggtgcccgccacaacacctggctaattttttgtatttttagtagagacggggtttcaccatgttagccatgatggtctcaatctcctgacctcgtgatctgcctgccttggcctcccaaagtgctaggattacaggcatgccgcattgcgttttatataattctcatggttctagtctcgagctgtaggattttgatcactgtttcaaacaataatgtgagtttgctaagaggtctaaataacaaaagctaagtgttccaaacacatatccaaacctatacactgggcaatgcatctgaattatatgtgaaatttcctgccattatttaagacacaaaaggaacattattttgataatgtatttatttgtgagtggagtgttcagaatgagcacgatgggtataacatttttgtaggtttttaaagttgaaatttagtgtaaatccaaagaatcaatagacaagtctgtgttttacttaacctatatgtttaaattagcatttttagatactgattttattcctaatttcagaattctcagcgtcttgccgatcaatatcgcaggcacagtttatttggcactggcaaggatcaaacagagagttggtggaaggctttttcccgtcagctgatcactgagggattcttggtagaagtttctcggtataacaaatttatgaagatttgcgcccttacgaaaaaggtaaacggtgtaggagtctgcctgtttgacttaattttgtttcccactccacattaaaagatcctttttgcttttaatagggtagaaattggcttcataaagctaatacagaatctcagagcctcatccttcaagctaatgaagaattgtgtccaaagaagttgcttctgcctaggttcatttttcagtttttttcttgtaacttctgcattttttgttgctatttatgtgattcaaattataccagtttataggcctctcacaagtaaaatgaattacctgtttgtttttgtatgcctattttagtcagtttgggggaagggatctgtgaggaaaggataagtcatagagcacttttcttttttaagagacagagtctctctgtgttgctcaagctggagtgcagtggtgcgatcatagcttactgcagcctcgatctcgtgggcccaagtaatcctcagccacctgagtagatgggactacagacatgcactactatgcccagctaatatattttaattttttgtatagagacagggtcttctagtgcttcctaggctggtcttgaactcctgagctcaagtgatcctcctgcctcagcctcccaaactactgggattacaggcatgatccaccgctcccagccagaacattttcttggttgatgggaagtagctgaccatggtatttagaaaacttctttctcatcgattaaagaagcagtactgaaatcaatgcggaggaatccatatatcatatttacttctggtgtgtagaagtggaaagggaatacatttgttgcttacttttttgtacctttacatgtgattgatcacttgtgagttttttctttcaaacatcttaaagcttccagagctttttctagaaaaaaaaatcagttttaagaatcaccagttctaaaagggtaatatcttattcatctttctgagaatggagtatcatgattcatgaattagatacttgcatcttaacatttgaaataatttaattttattattttttagttcgaaaactgtatcttcgggcaccaaagagcattgttataatcaagtaccagttgaattaagtacagagaagaaggtttgttttaaagaaattgttctgatttatttcattctttattgattcaaattctgtttaaaattttatattttaattcctttccaattaaagagaaaatggcatatataacaaagcataaaattcggccagggaagtgatgtgaacagactaaaatttattgtatataatttctggggctaataaagaattggaggtatttgagaaaggaattaatttgggttcttttaaacctatctgctaactcatttggcttagagtagtcacatgttataatacttatagttgatcaaaaaattgattcctaagtgttcttattaaagacacacacacacacacacacacacacacacattctctctctctctctctcacacacacacacatgcacacacacttatgtactttcttgctttttttgacctaagatcttagataactattacagattaaatactaatccactggcagacttcagctaattagaacactggaataataggcaagcatagtgaattacattttctggtgaactttttctgctttattgaagtatgcagaatgtaaatgaattgtttttataactttggcacttgctgtatcttagaacattcttttgatgatttattttctgtagttttgggagagataagacattggaatgcgtttctaactacctttagaactttagaaactgataatttaggaggttattttcaggtgattaatttgacagcttgattaggcaaagaaaaaattgtgattttgagatttttgtttcttattttcttcacatttaaaagttttttgaaactttttttaatggacctttatatgtttaaatgcagtctaacttggagaagttatattcttataaaccatgtgataagatttcttctgggagtaacatttctaaaaaaaggtacagagttccatatttctatgttctatacttgctttatgagtacttttttttctaaagagaaagaactgtcagatgttgggctatttcattggcaaaaggaagttaaatttaaaacataagcttttcagtattagaatgatcaaagtgagctataaaagaataatgttaatttaatagctaacacttcttggatattactgtttgtcaggcattatgttaaatgctaagaactttatatgtgatatctcatttaattcttacaagagtctaacagctgttactatttatcgccattttatagttgaagataccaagggttaagaagttgacaaacttgttcaagagcatacagctaatggccgagctggctttcaagtctatatttgtctacctctagcatcaagacactatttatttttctttgtatgaaatatatacaggcatactttgttttattgtgcctggctttattgtgacttgcagatattgcatttcttataaattgaaggtttgtggcaaccctgcgtcaaacaggtcatattagccccattttccaatagcatgttctgttgtcatgtctttgtgttatattttggtagttcttgactggccattcaccatttctctccctctcctcgggtctccctgttccctgagatacaacaaaattgaaattaggccaattaataactctataatagtctctaagtgtgtttttttttttttcgagactgagtctcactctgttgttcaggctggagtgcagtagcacaatctcggctcactgcaatcttcgcctcccgggttcaagcgattctcctgtcttagcctcctgagtagctgggactacaggcgccccccgatcatgtctggctaatttttgtatttttagtagagatgggtttttgccgtgttggtcaggtggatcttgaactcctgaactcaggtgatccgcctgccttggcctcccaaagtgctgggattacaggtgtgagccgctgtgcctggcccatctctaagtgtttaagagaaaggaagattcacatgtctctcaatttaaatcaaaagctaaaagtgattaggcttagtgaggaagccatgtcgaaagctgagataggccaaaagctaggccccttgcaccaaacagttagtttgcaaaggcaaaagttcctgaaggaaattaaaaatgctaccccagtgaataaaacaatgataagaaagcaaagcaggctttttgctgatatggagaaagttttagtggtctttataggagattaaaccagccacaacattcccttgagccaaagcctaatccagagcaaagccctaactctcttcaattctctgaaagctgagagaggtgaggaagctgcagaataaaagtttgaggccagcagaggttggttcatgaggtttaaggaaagaagccatctccataacataaaagtgcaaagtgaaacagcaagtgctggtatagaagctgtagcaagttatccagaagatctagctaagatcatcgatgaaggtgcctgcactaacagactttgaatgtagaccaaatgctttctaccagaagaagaagctgtctagtactttcatagctagagagaagtcaatgcctggcttcaaagcttcaaaggacaagctgactctcttgttagaagctgatgcagctggtgactttaagttgaagccagtgctcaattagcattctgaaaatcctagggcccttaagaattatgctatatctactctgcctttgctacatacatgtaacaacaaagtcttgatgatacctgtttacagcatggtttcctgaatactttaagcccattgttgaaacctgcttagacaaaagattcctttcaaaatgttattgctcattgacaacacttagtcaccaagagccgtaatggagacatacaaggagactaacgttgttttcatgcctgctcgcttaacatccattctgtagctcatggatcaagaagtaaattaaccttttaagtattattatttaagaaatacagtttgtaatgctttagcttctgtagatagtgattatcagagatgggtttttaagaggttttccagaaaaccttctggaaaatattcactattctagaagtcatgaagaatatttgtgattcaggagagtaggtcagaatatcaatattaataggaatttggaagaagtcgattcttattaaaatcaagagtttagtgatagacatactgagtttgggatacctgtggagtagtccagaagttaatttaaatatatgggcttagtgtacagaagtgagcagggtgcttatatatgaataaatattattttaagatatatttaaattttccttaaaataatacctatacttgatataaaaagttaattggaaattagtggcttatgacaagcataccagcccacactcttcccaaacccactttgctcttattcatagaagctgtcatcttcaaatcttccagctgatttccctggcgtgtgccttcttatttctgaatgacacgcttagagtactatttttttgacttagcaattttagaaattttctactcatctcctattatggtagatttcccctccttcattcctcctccaatataattatatttcgtcatattaataatttgtttatatatatttttaatataatatgataatattgtatttatattattaaaactacacaaatattatatacacactactaacccaaccgtgttattatggccaccactacctttatttttttccttgtgttagtgattgtctttgttttattttcttggttttgagtattccttttactaattttcttttttcctatttcaatctctcattatttgtttactcatttggagtgttccttgacttttatcccctcttacctagtgacattttaattttagttatcaaatttttaatttctaagaatgcttcttgttctcttcttgtttcttcttccccaccagccaaaaatctatgatgttatagcaaggatcatacattgtttcccagtaggttaagaaaccttggttaaaacctgttgtatcccagtaagttaaaagacgttaacgtgtcatcttcagtatggatgaaagaatattttctttcaaaagcagttggttgaggaagagaatgggacaaatgctctttttaaaacaccaattttgtgatgaactcaaattgcaattttaactttaccattataatgaatgtatttgatccaaaatgtttaaaatctaggctgttgtcatttaaataacaaattaccttactggtatcatgaagaataaatgtttgtactgatttggaaagacattctcatttaggggatgaaatagaaagtcaatgaggagaaagaaaagcttttattatttattttcttttaaatattttagtatcatggtacagtcaccagaaaaagcttacagttcctcacagcctgttatttcggcacaagagcaggagactcaggtaaggcttttgtaaaaaggtaattagtttatgataggatagttatgattctatgtatgcttaaaattctgtattttgccagcattttaaaaattgttcttaagctaagagtctgagtttatatttcagtttatattcattctaaggaaaaatgtggtatctgaagctctaaaaataaaggactagatcttttaagtacactttaaaaagtgttgtttctttgttttttgttcagattgtgttatatggcaaattggtagaagctaggcagaaacatgccaataaaatggatgttcccccagctattctggcaacaaacaagatactggtggatatggccaaaatgaggtaaactatcttttgcatgtgttctatttatttccttctaacaaaatagatttggaaaatatatctaagttgataatatgaccatagcttccactgtcacatctgggaggtgactcagattccccctgctgcgatgcttatctctttgccaagctttagtaccgtgtttctgtatgaataaaaaccagttacgttttcagcaatcatattcaatatttataaaatctaactcattatttacccaccctgcattttatccaaatgccgaaactcctctttttggattctttatttttgattatcttaccatcacatttgtagtcagaggttcctaatgcttaaaacctctgatctgaattttctctcctccaatataaaaccccttcgtcttcctcttcttcttcttcatttttttttttttttttgtctgaagacttgtctcactgtgttgcccaggctggagtgtagtggtgcgatcactgctcactgcagccttgaccccctggactcaagctatcctcgcacctcagcctcccgagtagctgggactacagaacatgccaccatgctcagctaatttttgtattttttgtagagacagggttttgccatattgcctaggctggtcttgaactcctaagctcaagcaatcttcccgcctcagtctccaaagttctggcactacaggtgtgagccactgtgcctggcctctttttctcatttaaatacttttcataccttttgtaaaacgggttccttgttgcctgtctatgccttcctcctccttcttaatgacaccacgttaattctgactgttttcccttggcctgttgcagaagcctcttaactattaacccttcattctctctctctgtttcatctgatatatgagtaccaaactaaatcttcctttatcatatcttacttctgcttaaatgttttttttctagcttagaattcaaggccctctatttatgaacttaaacttacttttccctctaagttacagaatttgaaatggtttatcttacctggattgtttatcacttgttgaagatccattttcaacttccatatatttatttacagtgttgcttctccttgtagtttccttgattcctcaaaactccttttaagaattcttgaagatctcgctttattactatttctcgctttattactgtaaagactatgagaaggtctttcatgatcttatcagcaaagtaattcctctctcttgaattcatagaggactttcagatgaattctaaagatgcttctgtagcacttaccacacaatgctatattttatttttttgtaattagtggtaaacaagtattattatatcttctagattttaaactccaaataaagatactagctccttacctttttgtgtgtctcctgtagcacctagcacaatgcctcataaacaggaggtgatcattaaatatttagaagaaattatttcccaagaatagttgcttggtaattgtatttgtcttttacttccttttaaaaaattgtttctgtcactaaattgcatccaatagatgttacttgagtgcagaattttctaatgacattacacagtgctacatctgacactaattcttttgttaaaaaataaatattctggccgggcgctgtggctcacgcttgtaaatcccaggactttgggaggccgaggcgggcggatcacgaggttaggagatcgaggccatcctggctaacacggtgaaaccccgtttctactaaaaatacaaaaaattagccgggcgtggtggcgggtgcctgtagtcccagttactctggcggctgaggcaggagaatggcgtgaacccgggaggcggagcttgcagtgagcggagatcgcgccactgcactccagcctgggtgacagagcgagactccgtctaaaaaaaaaataaaaaataaaaataaataaatattctaagaccatactttaatagaggtgttttttttttttttttttttttttttttttttttttggtgatagagtctcactctgtcacctaggctagagtgcagtggcgcgatctcggctcactgcaacctccgcctcctgggttcaagcaattctcctgcctcagcctccggaatagctgggactacaggtgcgcgctgccacccccggctaattttttgtattttagtagagatgaggtttcactgtgttgtccaggctggtgttgaactcctgagctcaggcaatccacccgccccggcctcccaaattgttgggattacaggcgtgagccacagtgcctggcccagaggagatatttaatgaaaaataataatcattagataggcagatttttagaaggagggcatcgaatgggttcttggatattggacacaataagaaatattgagctaaaagtctgaaggaattggcagatatactgttacaggtaaacactttgtagaagaaaataatgaatgagactttcttttgagattttcttagcctcttagttgttcccagttaaagcctcatatttttccttttcatgacaataaaaataataataaaatcagtaataaagtgaatatatgagatgttaacctgttcctttatgacaatgtcctgtttaccaattaacagtgtgtttttgtggtgatgggggcaagacaaatctttaaatggtggaaagcaaagaaagaaattataaaacatgattagttgtattatacgttgtttttggttgttggaaaaactatacatttattgagagaatcattaggaagctgaacatcagctatattgctggagtgatactgtttcagtggtttcttgacctttttgttgttgttgttgttgttgttaaacacagaccaactacggttgaaaacgtaaaaaggattgatggtgtttctgaaggcaaagctgccatgttggcccctctgttggaagtcatcaaacatttctgccaaacaaatagtgttcaggtaaaatactgtggtttgcaggagctcttagagaataagcattttttgtaaccatttcaaaagtaccctccagaagcaacatttgctcactttatttgcatttccatactggacacttagaaaatgaattaaaattgtttttacagtcaatctgttgtaaaaacatgtcagttatctacttttaaagatgatactaaaaagtagttgtccaggctgctgatgtctttctatttcattgggaggttttgtttttaaattggaaacattattttaggttgataaattataattttacattcaaatgtggtagttggaatttaaagctggaaagttatccttgctatgagttggtcaggagctcagccactttcttttggtttagcatcttctctaatctccctccccttccagtaatgctgtcttttgatagtaagtggatttcatattattctcttcagttttaatagtgtttccttcatatccttttattattgcttgttctgccctaagtgaccatttccagaaatgtcatttaggattttctctaaactccacgtagcagactctataatgcatactctgcagaaggtgaggcagtgggaggtagaggggagactactagactaggagtcacggaatcaggactttagttcttccttacagttgttcacctggtgaacctgcacatgtcctttaatttccttgggtctccatttcctcagctatacaatggaaatgacacttcctcccccacatccaggaaacaacagatgacattagaaaatagaagacatgggataagtataaaatgttgaaagagttaaacacattcaaggcaatattaagggattattttttacttccaagaagctcctggaagctttgggcaggcacagttggatcctactttagaaaaatctttctctaactataagtagaaaacccttctgctttttgaatgtagcatttccctcttttgatatagagtatctttggcaactttgaattttctttttcatactcttatataagacatcatgtgaaaattcttatttcttactgagtttttggaaatgaaattataatgtcttaatagtttgagaaagaatatcatacctaccagcggtaattgagtaagttccctctctttggacacttgaaagtagtatcttctttcatgaattagtgatattatttaataatgaatgagtgatctctcctaactccccttcagaagaggaaaatgaagtaggggaaaaggtaaattccccaagggataggtatgaaacctttatgaaccttctggatagagaagatgactgctgatttctgtgattagaaattatacttgggttattctgcaaattgaaatgaattatttaaaaaaaaacaactttaatgtttattaagcaagttttgttattcatgagtttcattagccttttattttttttttaaattttgaagtaaaatttcttgctgtcacaatacacattaaaaattacaaatatgacacatattaaacacattaagatggccgaataggaaaaatatgctaaaatatttttatataaatacattttttgagaattttgagaatttctggaacaaagtaatgatataatccataaatgtacaattaaagagtttaaggatatccaaaatacttggcaaagtaatctgaaataatactcttaggaaggtagggcaagaatgtgattctagtaagcaaaaatgtgatcaaatcgtattctagtcccagctactcgggaggctgaggcaggagaatggcgtgaacctgggaggcggagcttggagtaagccgagatcgtgccactgcactccagcctgggcgacagagcgagactccatctcaaaaaaaaaaaaagactatatgaacatgtatggcataaatatgtacaaatattatttattttaaaaaaattcaggggtagggacagggtagttagaaaatatctaaggatgttcatgaaataatactggctatgaatgacagttgatgaaaccgggtggtgcccatcttattccctcgactcgtgtatatgtttgatatatcccacaataaaccttaaaaaaaaaaagatgagtggtcaattataggaagatataaatagaaaaggcaataaggacaaaagttggcaaagcttacctaagcactcttcagataaaaagacatttttgctaactagatttgaatattatagtttaattgtcaaggaaaatgcctcaacttaatctttgttaagagactacttaaggcactatcagaagttccctcatggcaaggtgcaatccctcatgcctgtaatcccagcactttgggaggccaaggcaggcaggttacctgaggccaggagttagaaaacaacctgggaaacatagtgagacccgacctctacaaaaacaatttcttaaaattagccaggcatggtggtgctagcctgtaatcccagctatttaggatgcttaggcaggaggattgcttgagcccggggatttgaggctgcagtgagccatcattgtgccacaatactccagcctgagtgatagaaaaaaaaaaaaaaagtgtctttgttatattccaaacttgttctcaactttcaggtgagctggcttcctgtataactcttgtataggacagaacatactggttggggcaagtgaaactgtctagttgtatgcctcataaattaatgaatttcctttctaatatatacactgatatttatacacacatacacataaaaccaagctcaatagatgggtagtgcagctctattccccaaaacccaactaccctgtaacaagacacattagacttttgagattgcaaggatgaggactgaaatgctggcctagaccatggtgttgccatagtggggtgaccagtctgaatagccaacaatgcttcctcagtaaatacccattttgtcttggtgggatttctataaattgcaaaatgcagctattatgaagctgtaaaagagaaacagaaacatgtaacacctgggactgttttattaggcccaccgtatgctcagaacatgaaatctccactgctagggttatttgattgaaattatcttttgtgttgatgtgagagtttagctctgagattcttccacatgtaaaatgtaatcccccaaagtatttggcaagcacattttattgccttgggtcagataattgaaacattaggcatcatatatatagcatgtaaaaagtaaaacagaaacatttatgtttctcaccaagcagtaaattagtactcaactaataaatttcttaaactccctaataacagaatatggaaacaaaaaataaatctttccaaaagaagagctcatggacacatttcctcatatatgtatacataatatagtagaacacatgataaataacctataaaaatgataccaatatcattcatcaagagacgaggctcttctttaaattattaatttcatctgttacaggttttattatgactgtagtatgctgttttcatctaccttttatgtgtagttaaaaaaatagttttctatctctttacctttatttcagcctttaaaaagattccattattttttcattaatcttgtttttcagtttttcccattttttcttttaaacatttcttaaggaaccatatttaagattttatagaatacttagatttctagttgggatgtatcatttaaaattagatatgtagagagagtgttatgatatatttccttacgatatattagtggttatagtacctaaatttgaatagtgattctgttcattcattcattcattcattcaatattcacttccaggagattggggacttatttaaagacagagtagttcacattatagttcctttttttagtccttcttattcgttaaagaaaagactaggaaatgtttgttattacaaatattttattaaaattttgtgtgctctagcattattttaccttttaaaatcaatatgttaaaaatccaacttctttttgagctccccataaaaagggaattatttgttgcttatgggtttaacttgtgttatttttttcttaatggctaattatcatacatatattctattattgtattgatattactgatcatttgtgctacattaaaaattctgtagacagacctcttttcaagtacaaaacctcaagaagaacagaagacgagtctggtagcaaaaaataaaatatgcacactttcacagtctatggccatcacatactctttattccaagaaaagaagatgcctttggtaagtgtgactttcatgttacagggaatttttttagtttacttaaacttgtgttttatcagctttttagtattaaagttctgacttgggatcaatttcctccaaccctacaataaatctcagtttatctttaattttaaaagagaatgttgttttctttttctgttaagcctccctgttaagtaatagcagcaagtttagtttggccatgaatatcttctagagattgtatcggggtactgataaacacatttgtagctcagggatactgcatcagccatattttaaaatgggactaacagtttaaaaactataaatattcacagtgttaagaaacaatctcaagatgcattaagaaaaaggaaggtgcaaaacagaaaaacaaacgtaaacgtgtgtgcatatgcatgcttatatagtcacatattcttgtatgtgtacaaaaaatacacactggatctctgcaagcatagccaagcaactggaaatatgtttttaaaaacttgcttttcattctatctcttctagtactgttttgatgctctttgaaaacaatctaattgctgtaacaaatgaccatacgtaggccgggtgtggtggctcatgcctgtaatcccagcacttcgggaggctgaggcaggcagatcatttgaggccagggatttgagaccagttggacaacatagggagaccctgtctttactaaaaatacaaaaattagctgggcgtagtgacgcatgcctgtaatcccagatacttgggaggcggagacatgggacttgcatgaacccaggaggcagaggttgcagtgagctgagattgcgacactgcattccaacctgggcgaccgagcaagactcggtctccaaaaaaaaaaaaaaaaaagaccatatgtaatgtttcttcattgttctaagataaatctttaaggctgttgaggttttttgtatacaaaatggagagtaagttttaatgggatgggacaaaatgaggcttacagttgagtttaatttgagttcacatcctgttgacattaagttgatttggaacaagtgatatggtccaatgcctgcttttctattgtctgtggttccatccactagtgcctgtgttacacacctcttgttcaggttttatcatttaaaataaataagaataaacagtccatagcttatcttacttactgaataaatgctctaatttgacagtcatgtttcttaaagttccttacaaaggccattgcccaagaaaccaaataattccattatactatttttgaaatagaacacataataaatgggaattttaagttcagtttcttatgtaaacaataacttctatgtacatgttaaatatgcctgtatatacctaatttgaccatgtatgtatagtagaaatgaaaacagttactaagaaaatttgttattggctccaaattttctgaattaagtgtattctaatgctcagccataatatggggtttcatgtgttagtttatgtattcatggttaaaaatgtgaagactgttatatcttcatttgtgtcttttggtattatttggttgtattttattgtgtgatatggtggtataattatccttacctcccaggagtttgagagggtcttgccagttaaccgcagaattaaacatgcttaggactaattaatcaggagcaatactacaattagttggaggtaatttgaaacctggtttcaaataaccctgatattatgcacacatggtgcacacttttctagtagacatttaatgaaagtaatttaaaacctacctttgaaggatgaaaaacattgccttaaatgctctattctgtgaaagtatcaacatttatgcaaatacagtctaaattcagactttgaaaatgtattgaaagagaggatcatgaaataagttagagctgagtgacaaagctttctgagtgtttaaaagaatgttttacctaataaatatctgaaatgtatttggagccacatttgtttaaagaactgtataaatatgtagcactgttcatgtgaagttcaatagtaggaaaatgctgacagcccttgtggaactgtggttattattattttatgaatagagccaatttcaaacacctattagagtcttctcaggaacattttatagaatgcatctggagccttatgttatctctaagcattttaggatttgtcttcttggaaattcatgtaaccaaaccaccatgtgttatttcaagtgtatatagtattgggttacagtttactatgttttcagaaggttgtgacaactattagacttacagagaatgacttctctgccactaacggctttctaaagtgaatagagaggggcgaggattgaattcttcggtaaagctgggtgattttgttttattcaatacagtataataagtataaaaagtagaacctatagagagctataatgggggtagttttaaagaaattctgaaaatgaaaaacttaagtaaaggtttagttcattgtttatttcacactgagcatttactacctgaatgttttggacattttatttccatgactggagtggacacttttacaactcactgggttctttgctgatctttctctagaagagcatagctgagagcaggattctgcctctcatgacaattggcatgcacttatcccaagcggtgaaagctggctgcccccttgatttggagcgagcaggcctgactccagaggttcagaagattattgctgatgttatccgaaaccctcccgtcaactcaggtgagaggcatggcctagctctgcacccttaatgacttgatgaagtaaacaagcaatccactatatttttcactgttaacagcattaatcctttatgctattatgaaaaccttacttttgtgattctttttcttgttttaggaaaacaatctttcttcccattatcactcagaggaaagtatactgagaaatttttttgttttgttttgttttttgagacagagtcttgctctcttgtctaggctggagtgcagtggcgtgatcttggctcgctgcaacctctatctcccaggttcaagtgattctcttgcctcagcttcctgagtagctgggactacaggcgtgtgccaccatgcccagctattttttgtattttttgatagagacagggttttccatgttggctaggcaggtctcgaactcctgacctctgatgatccgcccacctcagcctcccaaagtgctgcgattacaggtgtgagccatggcacctggccaatacactgagaaatttttattttccttttcagcttaaggttacaacttccccaccatccaaaacgtgcactttcattttttttctaatttctatctcatcacttgcaaaaaccatatttttctccacattcattcccagtagcttcctgactcctagttcttccctaaatccttctgagtccttgtcattggtttcgcttgagtagcctttctaatcaacacagtcattggtatcagttactgtgacatggaagggacagaccaagttctgtgggccgctacgtagaaggatttcctgtcactttgctgcagaacctcagctcgcggagagcaagcccctttgcttgccctgtagaaatattttaaattattatcctttttttttttaacagaagtaaataggagatacgttagaggattttctctcctagatgtgtaaatacaaacttggggtcttataactcaataaatctgataaatttcttttgactgttaggatagagcagtggccataccaatagcctcatctccaaagctgcagtgaagatactttttactaccttaaagtctttcccatttgtgaacaacttgtgaacaattccccccaagaatttggaagatcactctctgaaagcacagtcaatactgtacttaaatggatctgagcaaaaataagtcacttagaagacaggattatttctagacttgagtgtgacttgactgaaggtctaaagaacaaacagctccttcacttccattgatcacggtggaagcacagggaaaggacagacacggaggcaagttggagtagtgctcatctaagttccagggatgcgggggagtggccaggggacttcaggtatagtaaataaataacctatttataagttatgtcaatgtcatgtttgaaatagaaaaccaaatactgcatgttcttacttacaagcaggagctaaagttggtgcatatggatataaaaatgagaacaggccgggcgtggtggcttgtgtctgtaatcccagcactttgggagacctagatggaaggattgcttgagctcaggagttcaagaccagcctgagcaacatagtgtgacccccatctctacaaaaaataagaaaattagccagacgtggtggcatatacctatagtctcagctacttgggagtctgagtcaggaggagtgcttgagctcaggagtttggggttataataagctgtgatcatgccactgtgctccagcctgagtgacacccagagtgagaacctgtctcaaaaggagaaaaaaaaaaaagtaacagtagacgctggggactactgaggggagggaaggaacaatggttgaaaaggtgggaagggacagtggttgaaaaactacgtgttgggtactatgctcactatctgggtgatgggatcaattgtacctcaaacctcagcatcctgcaatatactaatgttacaaacctgcccatgtactacctgaatctaaagtaaaagttataatttaaaaaaattataataaaatcagaaaataaaggtctgagatggaaaattaaaagaccaaagccacccataagcacaataaatccctccccccaaaaaattatatctattaaaaaaaggtgttgcgccaggcactgtggctcatgcctataatcctagcactttgggaggccaagacgggcagatgacttgacttgaggtcaggagttcaagaccagcctggccaacatggtgaaaccctgtctctactgaaaatacaaaaattagccagcagtggtggcatgcgcctgtaatcccagctactcaggagactgaggcaggagaatcgcttgaactggggaggcggaggttgcagtgagccgagatcatgccactgcacttcagcctgggtgacagagtgagactctgtctcaaaaaaaaaaaaaaaaaaagaccttgtaccctgacaagttttagtttgtgcaggaatgctagaatgactcaagattggaaaaatctttaaatgttaattacacaataagggtaaaaggagaaaaattacctaatgtcatctgagcaacaagaagaagaaatgaaaggcattaaaaattgggaaaaatttatatttgacagtatcttaacaacgaattctgcttctatatcacttcctagctttctgatgataacttcccgtgcagatctgtatgtaaggaatggacgtagtagtcatgctaatctgagtatttatctgtgtgatacttacgaattaacgatgtaagttaataagttagcatttcgtgaacctggttaataccatttgctaaggttaaattagccaaatcctgaagtaagctgtaaaacatccaaggtagggtagagaggcatcttatgagaaagctggccaactctcctggtcaccttctaatcttcctaacttcagaaatcaaggcagagagaggaaaatagtaattactttgtaggattagatttatggttgtcgaaacctttgtttctccagtgcagaatgagatagcgttttagggaaagccaaagactcagatgtcttcttcatgctcatcgtgtggaatttttcttcctttagaaatgtattgtctctcagggcttaaagcaatttgcatctttcgatgagacattgagtaataggcaatattctctgaaataatttgtgcaggctgggcacagtggctcacacctgtaatcccagcactttgggaggccgaggcgggcaggtcactgaggtcaggtgttggagacgagcctgaccaacatggtgaaaccccgtctctactaaaaataccaaaattagctgggcttggtggcacacacctgtaatcccagctacttgggaggctgaggcaggagaattgcttgaacccccatgggaggtggaggttgtggtgagccaagattgtgtcattgtactacagtctggacaacagagtgagactctgtctcaaaaaaaaaaaaatagaatttgtgcagttccccccacccccttttttttttctgttggcatttttgctatcatttagctgccttctttatatcctgaaacttacaggtggtgttggtctagtcagtaagagcaaaggctttgggaatagatagatctgtatttagaccttggctctagcatctcattgttatgtgacctccatcaagtgacctaatttccctaatattcaatttcctcatctctaagacagggagttaatattgcctctcttatagaattgtgagaaatatagtcatgtgtcgcttgatgatggggatgaattctgagaaatgtgttgttgggcgatttcattttgtgggaacctcacagggtggacttaaacaaacctagatggtatggcctactacacacctaggctgtacggtatagctcctgtcttcaaacctgtacagcatgtgactttactgaacactgtaggcaattataacacagtggtatttgtatatataaacatagtgaaacatagaaaaggcccagtagaaatacagtgtaaaagattttttaaaaaagctgggcatggtggctcacgcctgtaatcccagcactttgggaggccgaggcaggcagatcacttgaggtcaggagttcaagaccagcctggccaacatgatgaaactccgtttctactaaaagtacaaaaattagctgggcgtggtgttgggtgcctgtaatcccagctactcaggaggctgaggcaggagaattgcttgaacccaggaggtggaggttgcagtgagtcaagattgtgccactgcacttcagcctgggagacagagcgagactctgtctcaaaaaaaaaaaaaaaaaagagataaaaaggtacatctgtacagggcacttaccacgaatggagcttgcaccctgggagttgctctgggtaagtcagtgagtgagcggtgagtgaatgtgaagacctaggactgtgcactgctgtagactttataaaccctgtgcacttaggccacactcacccctgtgatacgagtctacctactgtataacgtacctgcatatgtacccttgaaactaaaacaaaagttaaaaaatttatcttcttttgccaataataaattaaccttagcttactgtaatgattcttctttatgaattaaaatctttttactcttttgtaataacacttggcttaaaacacaaacatattgtacagctatacaaatatattttctttatatccttcttctctaagattttttctgtttttgattttgttaaatttgtttttactttttacattttttttgttaaaaaccaagacaaaaacccacacatcagcctaggcctacatgggctcaggatcatcagtctcactatcttccacctccacatcttgtcccaccaggtcttcaggggcagtcatatgcatggggctgtcatctcctgtgataacaatgccttcttctggacacctccagaagggcctgcgtgttttacagtgaacttctaaaaaataataaaatgtatagtatagcaaacacataaacatagtaacatagtcatttattatcattttcaagtattatatactgtacataattgtacatgctagacttttacacagctggcagcaaggtgagtttgtttacaccattaccaccacaaacacatgggtgatgctttgcattgtgatgttacgatggcatgatgtcactaggtggtaggaacttttcagctccatgataatctaatggatacttgttcctgttggctgcccgtcgttgactgcaacatcattatgtggtgcatgactgtaaattagatactgttcagaaagctttggcacactggtaatagcaaatggtggtggcaaatatgatgatgatgatgatgatgattgaagacatagatggtaaaattttatggtgtcttaaaagtaccctctaaatatgattatttttatagtctgtccttttgaataggcacttaagaatgtatgaacttaataagtatataagaaagaatgttccccaaaatatatcttacagaggcatacaatttaagaattcaaacaggttgtaatggggtgtgtgtgtgtgtgcacacgcgcacgcatgcgtgctcattcacactaaagaattcttgggcatatgttcctgaatgtcctaaatggacattctaacatcacttcattatgggcagagggaaatggtaaagaaaaatttcatattatattattcagccacatattgacagcatctgttttatttgcctatggtaaagaattgaagcactgttaatttgctttttaaatcatgtaggcacaaagttatcgaactttagatttagaaatgaaactggaaatcattacactttccctttcctatccccaccctgttttggagagaaagagtgtgaggcttagagagttataaaactgttttaataccatgtctaagattaataactgaacaagtttctctttttactcgtgttaaagttgtactgccaattaacttaaaagaaagaaatatgcaatttctaatcctgatataggatatgggtatataaactctaacttgatgagtgaaacaaattaacttatttataatcagtttcatatctttatttattgagtgtctttaaataccccttacctttaaagtaagaaatattaaaatcaagcagaatataataatgaaaaattcttaagatatacttactaaaaacttatccttcggttaatacactgtatgtaggttgtacatacaatatgaaaaagtatatttttgtagcctacttttaaatccagaatagaggaggttaagaaggttgtgataaccatgagctcttttttttttttttttgagacaaggtcttactctgtttcccaggctggagtgccgtggcacaatcatagcttactgcagccttgaactcttgggctcaagcaagccttccacttcagccttccaagtagctgggaccacacctggctaatttttaagtatttttgtagagatgagttctcactacattgcccaggctagtcttgaacccctagccttaagcgatcctcccacctcagcctgcctaagtgctgggattacaggtgtgagccactgagcccagccctcttttatttcttttgatagtacactcataatcattaaactatcatttctggatgtgagattgtgcttttggattcttattttttctttataaaatactttttgttctcttactggagaaaacattgttggattataaatgatataacaaggaatgaggatatacatactataataacgattcagatatgttattttcatattttatttaactgtagccatgccacaataatttagagttttaaagaacaagtttgattgaaatctaaactttgtacaatcctgaattgagaagtttcctgtattttattatgacacaatatttacctaaaaatagagtaattatgaattgagaaaacatagctattaatttcatactcttatttgttaagtagattttgtctggaaaactgttcatatttaaaggagctttgtacctttgtattctttttgtttttccttgtttatataattttaaactctgtttatggatttgggattctaactatgctaaataataaattaaggcattgaatgaagtacctagacagtattttgattaattttattcccccattcttaatgtgcatgtaactggaaaattaagagtggcttccaagggatctactacaaaagtaaggttaatatgatctcttttaaaacactgaaggcgtgtagccagtgttgtcattaattctgcagtagatattttcagcacttatttacatgggaagttagagcagagtaagatgcacctgtaaagctaaatgccacttatttgcatatatataaaacgcaggatgaatttaccatagaaatataaagggtacttatagaaatgtattagaaaaatatatgaatttttaacttatatctagaagttaactttatacatttaactttaaatcattaatagtggtttaacaccataagcggatgtttatgcatcatcattttatgaacaaaagacattctaattttagaaataaagtgattcaaaagagaataaaatatcttactttttcttttaaaattaatttgtttagcgcattacatgataatagctcaagcttgtgtgatttttccctaaaaaattggtttataaatattacatttatagtatgaagaaattaatcatacatagtttatttatctaatttctaaatacccatggaagaaaatgaatttaatggaatgtagttgtgtattacttggtttcgagtgtgggaaaatttatatggtctttctaaaacagcactgtcagtagaaatacaatgtgagctacatatgcaattttaaattttctagtagccacattttaaaaagtaaatggatgcaatttattttgataatataatttaattagtctactatatttaaaattttatcatttcaacatgtaatcaatatgaaaattattaatgagatattttacatacttttttctgtaataagcctttgtaatcaggtatgtactttatatatacaacaaatcttctgatgctaaattttaactggaaatacttgatctgtgtttagcttttgtaaaatttactgttgaacaacgtggactaatgtgcctaagtggttccaaacatattttaaaatttgaagacaaataaaagggaactcaaagtaaattgggatacatacatacaacagaatactgagccattaaaaaatgatgaaatagtaaaattgggggaattttgatgatactaggatgatataatgaccaagagacaaatacaattttagtttggttgagagatgtgatcatcacgttgctgattttactatgtatagaggttatcttttcctttctaagattttgaaactttaattagttaacccacttacctagtttctattagctgtgtaactttctcttcctgttttttgttttgttttgttttgttttttgctttttaactgcagtattttgaggagtcttggagtagcaagctaatctttggaagaaaggaaaatataaacctgaaaactaacaatttaaagaacgtcttttcaggttgtcatttgaaaaatacttgatttctgatcactgatttgaattgagtgtcaaatatttgatatgttttgtaaattaggtgaagatgagtgagtaggttctaaactgcttgggtttaccgcactctggagcattgcagaagaatgtgatgttggaaggaagtgctgaaacataattattggcttgcctataggagggtgctacataattttagaaggtgtcaagaaattgacacagtctgaattagttctgttgagttgcaaaaaatgtaaagtttcttgattctgaaaataagaaatatgttcccagaaatctcatctagttaatgtgcttttaaaatcattgatgtctcttgttattacaataatagccattgaaagaatcttttttattagaatgttatttacaggtacgattagcttctatttaaataaattatttttatacttgatcttaggcaaaaggccaacaagtgatcagaataaattattttaagagaaaactaattataattgatatttggaattggaagcacaatttcctttagaacaattccacgaatggttgttttgattctcaaggcagcccacaaaagacagtttgaaacacaatttatgcagtgtcaatagtactgacctgactttggatcttggaggcaggggcttcaggtgatacccgagtggagtttttactccatttccattccgtaaggctataggcatttgaaagaggaaacttttctttggcaaccttccaccttcctttctacagaatatttcagtatttctagctcataggttttctaaaatattctctgtaatttattttgaaatggagtttttttatcgtttacagatatgagtaaaattagcctaatcagaatgttagttcctgaaaacattgacacgtaccttatccacatggcaattgagatccttaaacatggtcctgacagcggacttcaaccttcatgtgatgtcaacaaaaggagatgttttcccggttctgaagagatctgttcaagttctaagagaagcaaggaagaagtaggcatcaatactgaggtattaattatatatagaattttcataaagtgtcagtttgttcaatttgcatatcctagtactagaatgctgtatttttttgaactgttatgaattctgatatgattactttctctatgtgctacatttcctttgcttttcataaatatgatctgagaaaagtgattaaaaaaaagacagtaaaagggaggtttagtccatctgtttagcttattatgtagaatgtcagcttaaattttacctgtacctcatattgaccgtatagcctggaaaatctttcggaggtatagttaatggatttaagcatatggcagtttatgtagttaatgaaagtgaaaacaaattgtattataaatacctcccaaactggtttattatcattctatcattcttcatgctctgttagtatgatattgaatatctgaggtaccaggattattgttgcttgtggctctgagcatttcgtagtgcttttgcatgatgagagaaagattacaaatttagtattatgttagatggtacgttttattaaaatcaaatgcttcaaaaataattgctctgtgtatggcatgagataaatagcaatcagatatattgtttaataatatgactctattaaatgatggcataaatttgaaaatttgaccttcggtatcttccgggtctaaaattatatgactccattataaatattttggaaatgattaactaaaaaattgtttcaattcttagttggtaaattcaatgtggtagtaggtggtggtgattattttgtattagagaattaggaattacacttagttctaaggtaatctttataggatgtccagcaattaaacccctacttttttgaattgcttaaaaataagggaactgatctttttaaattctgtacttgagttacgtctgtatatatagtcatgtcctagataatctaatggaacttaattagttggaaatctttatattgtttataactgaactagctataagaggaacattaaagaaaacatattttgagtggaggtaatgaaatttagcttctaatgctcagccttttatttctgtaatctataccagatacctaagaccctcttattgtttcccagcttcaacctgtcagtatagaaaacggtgtaacttactattttttctcaatattgaagcacatttgtagtgaaatattattttaactatatattgccatttttgctttttccctatttcagtaacatttttcgctatttcagtaacattacatgtcaacaagagaatggtgggtattttggggggggttgggtggggagaaattttactaagcttgctagattctaaaaggtataccttatttggccccttttccccatttaggggaacaagggtgttggggctgggaagtagataagaggtgagtaagtcatccaaagcatatgtcttcattagcctccctgtatgaaaagctgatttctgtagagtgttggaggcctactttcagaatctgtcatatgttaacattcatcttctctactgacctgatttatatcccttagtctatttcattttataattatgacaaaggataaagtcattagaacaaattctttttattagttgacgtattgttgtgtttatatctcttgtgtttgttattaagatggaagctcaatcatgtccttgtttaacagaaaggtgatgtcttggcattgataattctgattcaatatccataggtacatggtggattctttaaatatttagtattcttttatttctggaaagttttcttaaatgatagtttttttaaaatttcatttctataaagttttcttaaatcatactttttagtgttttattccattacttcatatttcttcttcaggaactcctgctatacatgtatgttggatcttcattacccagcttcaatatttttcacttttcatgcattctttttatttcttcatttctctttaaatttttttcttccttttcaccttctatttctcttttaacataattgtatttatttctgtattccacatagcttagtattcacttattttaaaattattttaaaacgttttttagatttaaaaattctttttttatttatatatacatattttatttttaccaaaggagcaacactattaactgaagacttctataatttttttcttttatttctgattctttcttcggttttccccctcagttttgaacttttctaattttgatttgtgatgtccttttgtattttagataattttcctaatgttttccagctcatttggaaaggctacagttttattctgtacctaagcaagtctttctggtgtcaaagatttgaccttgatacttttcttttgctcattttcgtatgagattagttttcctgtactttcaaaagaaggcgtggttcaagatggctttcccaatttcacatctgtctctaatgtttttgtgtaatgtctaaaatatggaaacttggtttatgagatctactctgccatttttatctgggctttctcttccttttgtctctgttgtacctgtcctgcttggttttgatttaaccccagtggtttctcctgaatgtggagccttctcctagaaggcagcctcggctagtcccagggttcagagtagccagctgctctcttcacctaagagaccactgtggattccttgtactcacttgctattggcttggacaaaagccctcccattttcagatgctattatcagattaatctctcattaatctgtctttccagtgtatgcctgtgggctatcttggggttctcttgttatcagacacctccctgctggcctctgctttctcccgtacagatgtcagtactgtgcaggtcttaattgctgttggtggtttgcccctacattcttacagttttagtttcccaaggatacctttaaacttggttttattgtaaatgtcgacaatggattttgggttttactatctagttctgtcttaattctggaattcagaaagattaaaagctctgttgttgcagctgctgccacctcttcccagtaccctctcctcctatgtcatttttttcttcttatttttcttgactgtataagagagaatgtatgacatttcctgcttgaccgctgagtttgattataaattaaaatacacaatattttatacaaattgttttgtagaagatttatttacagatgctcattcacaggtaaaattgacttatgaaaatagttttcatgacaaatgtatcaggctcggtaactaaatatatggattgatcttgtttataaatgaaattaaatgtgaatgtaacttacatatttctgtatttgcttacatccgtatgtacacatataatcagcaaatgagttgatgtttcctattcgtaacttaatggtaatagcttggtaacagagttgggagtattaaaaagatgtaaagagccccttaaaattttgttgctgggaattttagtgttctactgatgaaggaaatagacactggaaggcgttgtttctattaggtaacttagatatcatactgaagacttcaaatacttattgttgacactcaaaagacacacttagtgtaagtaagcatttccccgcttttcccaatgaaataagatcattattataattccattataaatgctgatgatcatatttatagaaatatagaagataagacttgaaatgatattcgctaccaattaatgagtttgaagaagaaatcaggatgtgttttgctattttacatttattcttatttaactccaaagaattcagtgatgttatgtactattatttccatttctctgtgaagacgttgaagcttaagtaacacgcataataaggtcatacatttagcaagtggctcaattaaagttcaaacctggttctgcctggtttcaaagtctgtgctactccatggtattaggctacaacatgacttagggtttcttcctctgctctattgctgttcagatgtactcctcttttggcagagtgggagaaaatttttgcaatctatgcatctgacaaaggcccaatatccagaatctacaaggaacctaaacaaatttacaagaaaaaaaaaaaaacattaaaaagtgggcaaaggacttgatcagacacatctcaaaagaagacatttatgtagccaacaaacatatgaagaaaagctcaacatcactgatcattagaaagatgcaaaatgccttttctgtatgccaccttatatccccagtatttattatttctaagtcatagtatcttacagtgtatataagtctcatccgttcttttgattttctcttccctgcttgcaattgggtacctaggaacaaagttgcaatcttagccagttttttctttagcctttgctgatgtgtgaaaagcccttttttctaccctggatttctgtacttaagctggaacagctaagtttttaccttttttaaatataaagtttcagagtcttctgccaaggatcttttgctgttttcctactgttaaatatttcaaagccttttttaaacatagggaatataatcaaacatagcaagcagctgatgaacaatatctagatagtcttcattattgaaatggaataaatggtatttttgtattttaggctaacagacaccttgtaccttagataaggccaaccttctcataaaatccctcagttacttttattaataataaccaaattaactctggattccagggtgtactcatgatggaatgatttctctgtcatgttatcctgaggatctagtactctgagataacataagtgtatgacactttaggcttatgaaacacttagctacttaaattatttaattttttttcatgtgcagatggtattgtacccaaacactacctttgtgtgtgtgtgtgtgtgtgcctgtgtgtgtgtttttgagacagggtcttactctgctcaggctggagtgcagtggcgtgattatagctcactacagccttgacctcctgggctccagtgatcctgccaaagtgttgggattgcaggcgtgagccacctcacccagccttaaattatttttttttcaaggatgtttaacctgagggttagaggctctttggcacgtgagctgctgaaatgtgtgtgaaagtgttgtgcacgtgtatgtttctctttttttctgggaagtggatctgtagtgattcttagatgagtctatgagacaagaaacttttatttttttcatttatttagcgaatgtttgttaagcgtactatgccttggccactctacagggtgctgattggaccagtctgtctacctaccgttgtagatgttagaagctatattcttttcacatgcctaatataactctttgtgtatgtatacatgcccaggcatgttccttcctcagaacattaaattcaccattttggtcaactcaaagcaagtacaccatgggacacagatctgaaataatgtccagatttttacttactgaatgaggtgtgttgagtgtataagactacatgatgagatggcaagtaattgcctgaagaaatgatgtagtgattttgtgtgtcttatatttatttactttttgatccagaaataaattatatagataccactattttgtttggatgggggagaaaggatgggtgtgtattcaggaacttatgttacttttttgcaactaataccccttctcagtagtacaaagatttgatttctttttctttctatttcctacagacttcatctgcagagagaaagagacgattacctgtgtggtttgccaaaggaagtgataccagcaagaaattaatggacaaaacgaaaaggggaggtctttttagttaagctggcaattaccagaacaattatgtttcttgctgtattataagaggatagctatattttatttctgaagagtaaggagtagtattttggcttaaaaatcattctaattacaaagttcactgtttattgaagaactggcatcttaaatcagccttccgcaattcatgtagtttctgggtcttctgggagcctacgtgagtacatcacctaacagaatattaaattagacttcctgtaagattgctttaagaaactgttactgtcctgttttctaatctctttattaaaacagtgtatttggaaaatgttatgtgctctgatttgatatagataacagattagtagttacatggtaattatgtgatataaaatattcatatattatcaaaattctgttttgtaaatgtaagaaagcatagttattttacaaattgtttttactgtcttttgaagaagttcttaaatacgttgttaaatggtattagttgaccagggcagtgaaaatgaaaccgcattttgggtgccattaaatagggaaaaaacatgtaaaaaatgtaaaatggagaccaattgcactaggcaagtgtatattttgtattttatatacaatttctattatttttcaagtaataaaacaatgtttttcatactgaatattatatatatattttttagctttcatttacttaattattttaagtacctttatttttccaggatgtcagaatttgattctaatctctcttatgtagcacatgtgacttaatttaaaacctatactgtgacacagagttgggtaaacgatgattatttaactttaagcagttcaccatccatttcaaagcctttgattggcttttttgtaaataaaaataacttgttaagaaacaaatatatctgtcatagaagaactagaaaatccagggaagtgagaaaaatgaaaataaaaatcattcatagttttactagtagctaatcacagtcaacctcttttgtgtatcccaccagacttttttatattcatttgtttttagttaaaatataaaagtctcgtatattcccatttttctgcattgcattaccagaaggtagtggcgcctattaaatatgtgatatgttgttgtccagccatggcttctgcatttgcatgcttttgtgtgtgcatctgcaataccctgtgaatatcctgtgtgatggagtggcaagtacgcacagacacgtctgctgcatgcctaggtacgaggctgtctccaggagaagcacttgtttgattatttgagttgccaattgaatttgctgctttttttcatggcttgccattttcactgaaaagaatgactaatgaaaaacgatgattggttattagatttggatgtttggcagacattttctcaaaattgaactaagttggcctcttcacggaaaacaactggtatttgttgtgccaatgataaaattggagatttctagcaaaatgtataattttggaaaagttgtgttcctccactggaagcttgacagctttccttaacataaagacttctctttctcttcgctttcactactactactactaattcttcttctgattcttcttcttctccttcttccttcttccttccttcctcctcctcctccttcttcttcctcttcctcttcttctttctctctttccttccttcccttcccttccccttccttccttccttccttccttcctccctccctccctccctccctccctccctcctttctttttctttctctttctttctttctttctctctctctctctctttctttctttttctttctctttttctttctttcaagcagtcctcccgcctcagtcccccaaaatagtgggattacaggtgtgagccaccatgcacagccttacataaagccttttctaatgagatggatagtaattaacaaatgtgagtttttgatattatataaagattttttctgtgtttcgaagatccgtataactcagtgaatcagtatgttctggatgactaatatgtgatgttaagaaatcatgactgaggccgggcgcggtggctcacgcctgtaatcccagcactttgggaggccgaggcgggcggatcacgagatcaggagatcgagaccaccctggccaacatggtgaaaccccgtctctactaaaaatacaaaaattagctgggtgtgttggtgcgtgcctataatcccagctactcgggaggctgaggcaggagaatcgcttgaactcaggaggcggagattgcagtgagctgagactgcgccactgcaccccagcctggcgacagagcaagactccgtctcaaaaataaaaaaagaaatcatgactgggtaaaagatctgttcagagtacaagatggaccaatggatttgatatatttgaatataacagagtatgaaaaagtttattgatatagtttcagattacacactgcaactaatctttaagaaactattacttgtccactttttggtaaaatttcagagaacaatgtccaccattatctgaacaggctattaaaatactcttctcttttccaactacgtgcctgtgcaaagtcagatttttttcatatacttcagccaaaacagcatatcaaaatggattgaatgcagaagtagatctgagaatacagccacttttgttaagccagacaatgagatttgcaaaatgtaaacaatgctgctgttctcagtttttaaaaatatgttttttaaaagtatttatgttaatgtgtacttggtttactactgctatttttaaataaaacaagaaacatttttaaatgtctgttttaatttctaaagtggtagtgatagatataacccatattaataaaagctctttggggtcctcagtgatttttttttaagagtatggaagggttctcagacctaagagattgagaaatgctgatgtaatgttttattataaaggtgtaccatgaattatgtaccttacttcatattgttggacattaaagttgctttcagtttttttgttttaaa

SEQ ID NO: 3 - DNA, 142390 bp, Homo sapiens
  gene (1)..(142390): c.3139-1G>C (Exon26 skipping mutation)
gcaggaacgggggcggggacggcgctggaggggcgggtcgggtaggtctcccggagctgatgtgtactgtgtgcgccggggaggcgccggcttgtactcggcagcgcgggaataaagtttgctgatttggtgtctagcctggatgcctgggttgcaggccctgcttgtggtggcgctccacagtcatccggctgaagaagacctgttggactggatcttctcggggtaaagtgtcttcctattcccgttttcccagctccgtgccccggggtatctatagtgctaggcttctgagacacgtggaggcgcttaggcccgcggagcaggcccctgggctgtgtttgggagattctggaaaaacagactttctcccttttcctttcccctctggagcagctgggaaaggcgtctctcggagcttccgccattcagaaagtgtttccccgcccctgacggccccagcttgatgtttaccttgcgcgcttagttaggattgctctttctagtacggcctttattatggcagaaattgagccactacaggtctgcacagcaaagtcgagggaaataacctgctgtctatgatttagcaagtgatgatggatatttttgagttcaaatcactcagtctttaatggattttcttttctttttttcctagttgaatctcagttgttctcaggctaggtttgatatgaaaaatactactccctattgaagagggtaatataattcttaggatgctaatacaggagtctgtaagtcggagtacttcaggctttttatggttcggtacatttctttttaggggtgggatattgggataagtaggacagttcagatcttgatgtcattgaatagtggtgtctacctaaaaggaagaggctggggcacaaaattataatttaaagtgtttacttcagccaaaatgaggacagctgcccaggactcatttcccagttgccttggggagtgctccttcagccttggttacaagcaggtttttaaaggcgaaggggaagagtgggctgagacaaagttggtcaggaattgttattggtttacagagataccattgcttagtgattggctgtacactgtaactcatagggtatgagttatcgtgtccagcatatggcattttatggcttcttggttccagtctagagcccatatagcaggtgggctttaagagataattatccagctcagaccgggagtgagacgggactgttttttcattctaatgcctctctgggcctgataatttaaaggggcttgcattcttcagctaaaattttattttcttttattttttttcccccacagtggtctccctttattaatccaacaaatgtttattaaggactgctctaggcactagagataccaacaatgaacaaaacagacaaacatctctctccttttggagcttacattttagtggaaagagacaggcaaaaagtaaaattataggatgacagaaggtgaaaatagagattaaaaaggaaagggggatgaagagtgtgtgtgtgtgttgtgggtggggggctgtagggagctgcagttttacaataagtggtcagggacgtcctcgctgagaagggaatttttgagtccagagctcaaggaagtgagagaacttaccttgacgttctctggaggagaagaaagtacaaaggccctgggggaacctgcctctttatgttcagagagcaacttaagaggcctagtgagctggagcagagcggagaggaggtcagaggtcaggccagaaagggaaaggggccagaatgtgtaggactttatgggctatattgaaaattggggctttcattctgagggagatgggaagctgttggagagttgttagggaaacgtgatctgaattatgtttctaaaaaattggagtaagatatcataaaatttgccatcttagtcttttttgtatctggccaattccactcagaattcttttttaaacagctttattgagatataattaatatatcatatgattcactcatttaaagtgtgcaatacaatggtttttagtttgtcttcagagttgtacaacctttatcacaattacctttaggactttttcattacccaaaagagaatctccataaccattagtactcaatcccacccgctttcctagcaatcacttacctatttttttgtctctatatagctctcaaaccctatgatattccttctatctaactgtatttttgtactcattaacagcctctcttcattcccaccacccatccatcccagcctctggtaatcaccattctacttactacctcaatgacatcaaattttttagctcccacatataagtgagaacatgcgatatttgtctttccctgcctggtttatttcacttaacagaatgtcttccagttccattcatgttgctgcaaatgacaggatttcattctttattatggcttaatactattccattgtatatgtatatcacattttctttatccactcatctgttgatggacagttagcttgattccatattctggctattgttgaatagtgctgcaggaaacatggaagtgcagatagctctttgacatactgatttcatttcccttgaatatataccctgtagtggatttgctggacccgcttgtagttctacatttaatattttgagttatttccataatgttagtaataatttacattcccaccaacagcgaggaaggagttcccttttctccacatcctcgccaacacttatcttttgtctttttggtaatagccattctaacaggtgtgaggtgatatctcattgtgattttgatttacatttccctgatggttattgatgagcaatgtttcatatacttgttggttatttgtatatctccttttgagaaatgtctattcaggtcttttgctcattttttaaatatggttttttaatttttttatttttttgctattgagttgtttgacatccttaaacattttggaaattaacctcttattagatgtatagtttgcaaatattttatccgattctgtagattctgtcttcagtctgttgaatttgctgtgcagagaagcattttattttgatgtaatccctttgtctatttttgcttttgttacctttgcttttgaagtcatatccaaaaaatcattgcccagatcagcagtccccaacctttttggtaccaaggactggtttcatcgaagacaatttttccatccacaggagggaggggatggtttcaggatatttcaagcgcattacatttattgtgcactttgtttctattattattacattgtaatatatagtgaaataattatacaattcaccataatgtagaatcactgggagccctgagcttgttttcctgaaacttgagggtcctatctgggagtgatgggagacagtgacagttcataaggcattaggttcttctaaggagcatacaacctagatcccttgcatgcgcaattcacagtaggttttgcgctgctatgagaatctaatgccaccgttgatgtgtcaggaggtggagctcaggtggtaacgtgaggaatggggagcagctgtaaagaaaaatgaagcttcgcttgcttgcctgctgctcacctactgctttgtggcctggttcctaacaggccatggactggtactaatctgtggccctggggttgggaacctctagccctgaccaatgttagggagcttttttcctgtgttttcttcaagtggtttcatggtttggggtcttacatttaagtctttagtccattttgagttgatgctgtatgtggtgagagataattgactactttcattcttttgcatatggttatcagttttcccaacaccgtttattgaagagcctgacctttccccattgtgggttcttggctcttttgtcaaaaatcagttggctataaatatgtggttttatttcttgggtctctgttctgttctattatctgtgtgtctctttatgccagtaccgtgctgttttaattactagagtttagtatattttgaagtcaggtagtgtgatgcccctagctttgttcttttagctcaacattgctttggctattcagagtcttttgtgaggataatgttttcaaggttcacccatgttgtggcatgtatcagaactcgatttctttttatggctgaataatattccatttgtttatattatatatatgccatatttatttattcatatgttgatggacacttaggttgtttccaccttttggctattgtgaataatgctgttattaacattggtgtacaagaatctgtttgagttcctattttcaattcttttgggaatatacctacgtgtggacttactagatcacatggtaagcttttagtttagctttttaaggaactgctaaaactgtttttccatgggagcagtgtacaagtgttccagttctccatatgctcaccaaaacttaatttccttttttaaaaattatagctatcctagtaggtggtgggaagtggtatcttactgtggttttattttgtatttctttaatgactaatgatgttgagcatcttttaatgtgcttattggccattatatgtcttctttgggaactgtctattaagtcctttgcccattttttaattgagtttttttttctgttgaattgtgggagatctttatatattctgaatattaaacccttattgggtgtatgatttgcaaataatttctcccattttgtgggttttcttcactttttgatattgttctttgattcacttttaaatttttatagagtccagtttatctgttttttcttttattacctatgcttttggcatcatacctaattcccaaatccaatgccatgaagattttctgttatgttttcttttaatagttttatagttttactttttctattggagttttaagtaaattcttgtatattagtgtgatacattttaagttatttttgtatatggtgtgaggtaggggtccaacttcactcttttccatatggagatccagttgtcccagcaccacatgtttaagagtctattctttccccactgaatggacttggcacccttgtcaaaaatcaattggtggtaaatgtatggatttactcctggaatctcaattctattctattgtatttatatttctgtccttatgcctgtaccacactgttttgattacagtagctttgtagtaagtttagaaattgggaaacatgagtcctccaactttgttcttcttttcaagattattttggctatttggggtcccttgcaattctgatgagtttgaggatcaccttttccatttctgcagaaaagccttttgatagggattgcattgaatctgtagataactttgggtagtattgacatcttaacaatattaagtctttctatgcataaacatgggatatctttccatttatttgtgttttctttaatttctttcagcagcattctgtagttttcagagtacacgtttttcacctccttggttaaatttattccttggtattttattcttttagctgctattgtaaatgcagttactttcttagtttcctttcagattgttcatttctggtgtataacaacagctgatatttcaacgttgatgttgtactctgaaactttgttgaatttacttattagatctagtagctttctttgagatttttatatgggattatgtcatctgtatatagagatagttttacttcttcctttccattatggatgccttttatttcttttccatgtctaatttctctggctagaactttcaatatgatgttgaaaagcagtggtgaaagtgggtatctttgtcttgcttcctatcttaggtggaaagctttcagtctttcaccattaagtatggtgttagctgtgggttttcataaatgccctttatcatgttgaggaaatacccttttattcctagttttctgagtttttatcatgaaagggtgttggattttgtcaaatgccttttctgtgtcaattgaaatgatcatgtatttttcctcccttatcttaatgtaatgtgttatattgattaattttcttatgttgaaccacccttgcctttctggggtaaatttcagtcacttatgttatatagtcctttaaattgtgttatcttataacagaatcactctgctactgttttgagcataggccatagggaaaagcaggtaaaaggtaatatggcttgaaccaacattgtagcagcggaagtggtgagaggaggtcgaattttggctttgttttgaagatagaaccaacagtatttgctgacagattagatgcagaatgtgaaaggaggagatgagtcaggatgaatccaaggcttttggcatgagcaaccagaaagatgaaggtgacttactaagatgggaaatatacaaaaggagcagtttggggaaactttatatctattgagtggaatatgccaattagagattcaaatatccagtaaataattggctatcaaagtttgaagttaagaggaatggtctaggctgtttatataactttggaagtcattagtgtataacagctaatttaaaagccagcagactctaagggagtgagtgtagagggagaagagtagaggtctgtgacttgaatcctggaatgctgtgatgtttagagattggggaggtaagaaggagcagcagagtatactgaaaagggattgttatactgaaaagggattgatatagatggagactcaagaattatcacagaaacctgataaaatgtttcaagaagatgggtgtgattaattgtgtcacttactgccggtacattgactcagatgagcgttgagaattggctataggatttgacaacataaaagtcattggaaaccttgacatgagcccttttcgtggagtggagtggttacagtgggtttaagagaggattaaaggagtggaaacagagatgctattatagatgactcgtttgagtagttttcctacaaaggggagaataataatggagcagttagccaaaagttgagtttttttttcttcttcttttttttagttggaaaaaattgcgtatatgttgatgggtcttttctggcagaccagtagagaggaaaaagttgatgatgtaggagatgggaaaatgtctttgagtagatgtcttcgagaaaatgtctttgagtagatgagaggtttgcacacatggagaggttggatgtaggagtactgatagttcatccatagttacataagaaaaggtagatgtattagagttctcctgagaaacagaaccaatgggagatctttatatctctgtgtccatctctatctgtatttctgtctctgtatctatgaagagattataaaagttttaagatctgccaggagacatacccacgggagctaatggtatagttccaggccagttgtgaaggcctgagaaccaggagagcctatggtgtaagttccagtctgagtccaagtctgaaggcaggagaagaccaatgtcccagctcaaagacaggcagagggagcagatcttcccttacttagcctttttatttattcaggccttcaacaaattgaaggcccacccacattagggagggcaatctgctttactcagtctactgaatcaaatgttagtctcacccagaaacatcctcacagacacacccagaataatggttagccaaatatctgggcaccccatggcccactcaaattgacacataaaattaaccaccacagtagagtatatgggtacaaatataattatgtgatatagatttcagggtaagagcctgtggaaattcatttttgattgcttctagtgaaatcggaagcaagatcatcagctaagagtgacgatcggtggaggagatatgaagtttaagtggagaggagaaggtataaaatagtcttaggaggggaggatagtaaatagattagggaaaagttgtaggattgccaggaagtagtaagggcccacttgaggctggtggtcacaaatttaaggtgagaccagtcaaaatggttgtgcttttcacctgctgcattcattcagctgcataggtacaggcacagagtaggtcaagagttcttttttattcggggttagagttttgccaggagatagtaataaagccagaagggcaatgaatttgagggagtatgcaaggaagtggctgttaacttggagtttaaactagtcaagaagagaattaaggactgcccaaggggtgaggacaatgatatggtagcagggcccttaaaagccccagttagatgaaaagattgttggaattgagtttctagagggaatgaacttgaaaaacaggaggtgttggttggagagtgggatatatggaattgagattatggaaggattcagtcgttggtaataacatagtatctttgtaggaataaataggtggagcaggatgcagacaagatcactggaggagggctggtcagaagactgggaggcactatctcccttggatattatacatcaaagcttgtgatctactagacaagtagtggggaaagggtaggatatagatattaatggctatagttttgatggtgatggtcatggtgatgatgatggtccattaacactcaactcaaataccatcaatttgatttatatctaacaccacaaagttaggtgttgagttacatgtggttatattgtaactaatagtcagcccttcatggacttctattctttgatgagactcttcttgtaggagtagtaggtgccttaaagcaccttttcatagttgtcagattgaaatccttcaccagtgttttaggttaaccctgttactgtggaagtttctcttggctttctgtgtgggctgcttctttgtctagttttaccttttggggttagcatactattgtgaataatttattggtgagaaggtaagcagagaagtagagtactctatgacctagtaatttcatatctaggaatctatcctatagaaatgataggaatgccttacaatacccacatatccacaagggtattcattgaacgttatttttggtgaaattcgcaagcaacctaattatcatcaatagggaattgttaaattatgatagataaaatggaattctattcagtcttcaaaaagtcagatcaagaagtggtcttacattttaattatcccatcctgtcaacaagagtgtcttcagttgcaagtaatggaaaaaccattcaaactgacttcagcaataaaaggttatttattggtctgtttcatggagacatctgaggtagagtggccttcaggcaagttcactcagggatccgactatttttctggccttattcttggccctcttctatgaaaacaccttcagggtggtttcttgtatgcttgtaagatggctacttgcatcaaccatgaccacatctagcaggagcaaaagcatcctttcccgtaccagaggagagtcccgaaatttgttgcaattggactgccttggaagcaataattatggccaggagatggaggctagagaactgagacctgatcatagctcctatccttgaatcagttgtatagcaaggggaattggattttccttaagacagttggatttcacctgtagtcttggtgatgaggtcagttccatccataaaactttgctgttacacattttgggatggggtgaggagggctgaatggagattaggatgctattgaaatttgctgtacacaatggatcattatcgtcttctttcttagtgttaaggtaatcagcctctttttcctcctcctatgcttgactttactaaaaccatgagacatgtttaacctcaggactccaatttgaaaaaatatagactgttatttactttattacttacagaagcccttcatactactctcagcaagaaagaggtaggcagggagtgagggaggggggatcatgcttactgagaaacaaactatcgagtattgaaactcccccttcatatgcctgacctcagtcccattcagttaccagtaggggcccctattaattggtacctcaccagcttttgctgttcgttcataaaactgagtcattgaagtacagtagaaaaataattggactacaagataacttatttccttccataattgcaaaatatctgatttttcttcttgtttgtattatgtaaacttaccctgtctgagggtcctcctggattgttctttgcatttatatatacatagaatttcattttcttttttcttgttttttttttagacggagtctcactctgtcgcccaggctggagtgcagtggcacaatctcggctcactgcaagctccgcctcccaggttcacgccattctcctgcctcagcctccccagcagctgggactacaggtgcacgccgccacacccggctaattttttgtgtttttagtagagacggggtttcaccatgatagccaggatggtctcaatctcctgaccttgttatctgcccgccttggcttcccaaagtgctaggattacaggcgtgagccgcttgcccgaccttcttttttttttttttttttttttttgagacgttgagatagagtctcactctgttgcccaggctggagtgcaatggcacgttttcagctcactgcaacctccacctcccaggttcaagcgattctcctgcctcagcctcctgagtagctgggattacaggcgcccgccaccatgctctgctaatttttgtatttttattagagatggggttttaccatggtggtcaggctggtctcgaactcttgactacgtgatccgcctgcctcggcctcccaaagttctgggattataggcgtgagccactgtgcccggccaatttcattttctattttgaaatttaaactaccactgacacttcgttttccctctgttttacttagcatttatcttagagaataatcttaatatgtatagttctattttattcttttactggcagcttagtatgccatattttggatgtgtcattgtttatttacctattaatttaccctataactgcttcccatatttttgcttttacaaagggatgtaatgaacatcctttacatacgtctttgtgcatatgtgcaaatatttccataggatagatgtaattactgacttgaaggttatgcagatttaaaattttgatgccttctatgaaacatctttcaaaatggtgatgccagtttcttctctcgtaattactgcatatggtcaatcttttaaatttttgctggtaatgatatttcaaaattataaccagttttttggcctcatttcttgaataacttgttttttctcaaagataagaaatgtctccttcatcgtatgtcaaatttccatatttacatggatctatttctggacatggcaagttttatttatttattgtatgtatttacggtgtacaacatgatgttttgatacacatatacgtagtgaaatgattcctacagtcaaacaaattaacatgttcaccaccttccatagtctctgcagtcttcaaggttttctctatatgggattagacatgctatgtctgatctgtttttgtatttttacaccaattccacactaattttttttttttttttgactgggagtctcgttcttattgcccaggctggagtgcaatggcatgatctctgctcactgcaacctccgcctcccaggttcaagcaattctcctgcctcagcctccctagtagatgggattacagcactcgctgccacacctggctaatttttgtatttttagtagagatggggtttcaccatgttggccaggctggtctcgaactcctgacctcaggtgatctgcccgcctcggcctccgaaagtgctgggattacaggtgtgagccacctcacctggcacacactattttaattactgtagttttaaaagtttcatatttagtagggtgagtttttccttgttggtcttgtttttcaaaaaaaatttgctgctcttgagtattttctcttcccagtgaactttaatgtaaactcacgtggttcaatgaaaaattctgatgactttttttcttggtattgcttcttgagtgtattgatttaattaatatatttacagttttgggtctggctgtgccgaaacgcagtgtgtcttatccagtccttttttaactgtcttaataaaatttgctggttatctttaaaatggatcttgtatattttatgttaggtttattcccaggcaggttgtcatttttgctgttactgattttggatataaattttggatataattgtataatttggacttggatataattgtatttgattctgtcttatatataaaaatgagataggataataatttatcctaggataaaaataatttgagtatccttattttgcatctggtaccttacttgctcctgttaaacaaatagataaaattacttgtcttcaaagagatcctgtggaaaaattatttattttaggagactttggagctttgataaaaattaggcttatcttttgtaaaagctggttagtgatagcaatcagactcttttaaaggtgatttttttttctttcctttgataaaatgcttaatatgagggaggattaagaaagaggatggcttttgaacagtttcttcatggggaaataagaaattagaataatttcatgttctccaaaaaaaggagaaaaatgaccttccctcctgagcctacttcaagcctctgtttctttctgactctattgttctcatctctgcatttttccaatctcttctactgttagtgttttaggctagctcctcagtggagggcagaaattcaccttctctttagctgtctttgaaaccaagaagatagaggtatgagatcttcgtagtctgtagtaagaataatagaagccatcagaaaaaaatatcaaagctttgtagctgctcctggaagttttgatgtgaagcaggagacatcacctattggtacctgacttgcttttgctgttcattcataaaacagagtctctgaaatacagtagaaaaataattagactggaggataacttttttccttccaggaattacacaatcacaaaattgctgatttttcttcttattcatgttacataaacttatcctgtccgaaaagactgtatttgaacttactatgtaagatttgctttaggtaaatttatggctgcttccagaattgtgtattaattttccagtttcttttttaccagtctccacttttacctttccctcttccccctatacttaaattggtcttactgtaaaatttatgcgtttctctttctacctggcaatgctgattttttttttttttttttttttgaggcaaggtctcactctttcacccaggctatagtgcagtggcaagatcgtggctcactgcaacctcgaatccctgggctcaagcgatcctcccacctcagtctcccaagtagctgggactacagatgtgtgccatcgcacctggctcatttttgtattttttgtagagatagtattcgccatgttgcctaggctggactcaagccagcctcctgccttagcctcccaaagtgctgggattgctggcacgtaccactacatccagccagggctgagtttctgaatcatcattgcagcaagagaaattggattacctttagaccactggctctactgtgggctgggagtgggacaccttccttaaagcgcattggacattggctttgtgggtaactgatctttacctgaatgaaatttatcagtactgtattaagggtctagggtggaacggatgctagcaaggcaaccgttaacatccacttactgatgaatcctataaaattttatttcaggccatacgaagtaacagtaataaatataaaaggaaaaatagacaacctaagcaactttttaaattgacttacttgaaaactttccctgcaatttcccggtttataatggttgatttcagctgactggctatagctacttagagaacagaggaaattcattaaaaataatgaattattcagttgggtagtgaaatccagttataaagcacttcgctgtgccatggattcagttcaggtcaagtgatgttcctggtttatgggcagtgtggcttctcactatgacacagcaaagaacgtagcttttatcctttacccttgttactaactaaaattaatggcattttattgtgtttatttgtttgattccatttacagtttatttcacttggttttattagtacaaaattgtgctttatataatatttgacagttaggaaaaattgttagatacctataaagaaacaagtctctcaaaaatcatcctactacttttaaaaattacatcgtcttactacagttaacctagatgtgaatgggtagttttatttagcttttctggtttgtttgcttggtctgtttggagggaagttaagattagcagaaatgtagtaatagattcatgaaagtcttgaaagcttctttaattagagaatttaatgagggctttggcatgcattctttggtttttctctgttttcctctaccccttcttattctttttggttcattgaaaagtagaaagaaattctcaaaaaccgtacaggagaataccttataaatgatatcttctgcaataaactatagattgtatatatgtatatgtatctagatacacaatctgtgtgtgtgtatatatatgcttgtgtgtgtataaatgtataaattagttactagtatatacgtaagtataaaacctcaatgtgcaaggttacattttcagaaaatatgtaatataataaaagaaatcaagcccagaatttttaaaaagtttattgcgctttctgttaaaaatgaaaggctttttgactggaagctgcttctcagtaaaaataacataattgtgttggtgaagcccaaagattctaatgaaaattagggtattgacaaccaaacggaattgctggagtacttaagctgctttggttttgtaatctttctgtgtcagaatatttgaaaaacacttattaatccagtcttgtaacttatccttgaaatctcttttttaatattcttttccacacacatgaaaagttagatgagtgtatgaatttctgttgtcagactagttgtaaacctcctaaatatagtttctgcagtatagttaaagagaaagaacatcctggctaacacggtgaaaccctgtctctactaaaaaaaaaatacagaaaatgagccgggcatggtggtgggtgcctgtagtcccagctactccggaggctgaggcaggagaatggcgtgaactcaggaggcagagcttgcagtgagccgagatcacgccattgcactccagcctgggcgacagtgcgagactctgtctcaaaaaaaaaaaaaaaaaaaaaaaaaaagaaagaaaataggcccagcaaggtagctcacgcctgtaatctcagcacattgggaggctgaggtagggaggattgcttgaggccaggagttcaagaccagcctgggcaacatggtgaaactccatttctacaaaaaatacaaaaattagctgggcatggtggcatgtgcctgtagtcccagctacttgggaggctgagtgggaggattgcttaagcctggggaggttgaggctgcagtgagctgtgactgagcaacagagctagactctgtctcaaaaaaaaaaaaaaaagagatgggttttgaaattcagtactttttttgagtgaggtccaatgggtcagaaagaagcattggataaatgaatccattttctcttctctgtttgaatttgtaatttgaaagaatattctacctataaagtacttcagtgcttaattagctgtcagtgaatttatatatcttatctaattcatatggatttgctatttttatctgtacctacagattcctgacctctctaaggggatcccagtatactatagggaatgaggtataatagaagtaaaagacctatcactagtcctgtcatcattccaactcatgtgtaattatagtttaaaagaagtgacatcatgtgtattgctgtttatctttacattaatcttgtggtcaagaaagcaaatactataatatataataattatataatatcataagacaagtaatataataatgggaatataatcccattttacaaatgaggaaatgaaaatttagagaaataaagtgacttgtccagggtcacatggatactaagtgaccaagtgtcaaagcagaattttccaaataacttaaagataattcttgtacaaatatagaacgaacacatgtcatatgtgttgtgttaatgagggaaccagaaggatgacaacattggttcagagagatgcaaagataaatatagacattggaggaaaaagttggaaataagattgttaggttagatacaaagctgtgttataggccaataaaaaccatagactttgaggttatcttttttactggacaggattcagttacacctttatgagaccaaaatttattatttaacatgtggatattagagtctgagttttaaaattattagtaaatgaccgtcaaataaagatatgtcccctaatgaaatactgataatcgctgggtgagcttgtgctcctatatgacattgaaatgacatactgccctctctttgtcttctaagttttggatacttttttttttttttttttgacacaaagctgcattagaacctaggtttcttgattttcagtccagatttctttccactctacttcctgcttcttcatagtataattttcaacactagagcagtctgcataacttttgcaaaatcagctagtctttcttattagttttcctttgtgcaaagtgatgtagatacagctttcttcttcagagaaacattgtgaaattcaatgaatatttgtaaaatttgcatacgtgcccaatgtgagaaattgaaattattacttaagtattgcaactgttcttttaggatattttgtttgcaaatttcagagtaattataaatattcttgcatttttattgtaatcagtatttataaaacagtgtatttcatcacattaacctttacatattttgaataaaatagtattgaaccattttaaatagtaagtggaaatttttccacattaaacagtataacgggctaacagagttaagcattgcattatttaactaataattttttcctgaacttcagattattatctgtatgtgtcatataacttgacaattttttttttttagtgctttttaaaaagagtgggatactttattcagtttagccctcaagcaattaggcaagtcagttaccatggtaacagtaggtattaatttccttacctagttagaggttttatgaacaaagaaatctctgagttcatccaccaaaacccaactttctcttgagactggcctcttgagactggtgttaaatttgtctattttctagaagatgacactattctaagtggaaaatacggttctcttgaggtgaatttctactctatcaagagtgaagtagagtatggcttaaaagttaagtgattaaaaagctaccctttcttagctaatttggaatgtaattggtcttaatttttctaaattcgttctaaccaaaatcttattggcgtgatttctattgacatgaactagaagtgacttcagcagacaacttgtcccaatatctaaatgctgtcaaatagaatcacttaagatgaatttcttccaaaacagagttcacaattttgacagataatctcttagcatttaattgactagtattaccaaccttatggaataggtccactcgtttagctatcatgaggaccattttgcaactaacttatcaaaaagccttcaccaagaagttgcatatcttattgatattttagaatgcgattatggagattaaaaatcaccacaatgggttgttaataacgccagccttgaactttcagttttagagcattttatctgtgttctgtagtcaaagttggtaaggtgtccagtgggtcatgtttgacttgctgcttgtttttgtactgtgtgctaaatggtttctacatttttcagtggttgaaaagtcaaaagaagaataatattttatgaaatttaaataaatccaggtttcagtgtctataggtaaaatttcattgtaacgttgttatgcttaagtattgtttatgacttctttgctatagtgacaaacttgagtagttttgacaaagatcatctggcctgtaaggcctagaatagttactgtctaaccctttagagaaaaaaattgctggcccttgttctatagtatgaaaaaatatagccttgattattcattaaaaaattattttcccattttattgacatacttttgtcccctgattgttaaaaggaatgcatgttcttatagaaaagttggaatatatagaaaagtataaagaacaatatgaaaaaccatttgcaattgtgagataaccactaatgttttggtatacattgctccagacttacacacaaacacacacgcgtatttattttatacaattagagtctaattttttttttgagacagtcttgctctgttgcccagggtggagtgcagtggcaagatttcagctcactgcaacctctgcctcctgggctcaagtgattcttgtgcctcagcctcttgagtaactgggattacaggcgtgcaccaccatgtccagctaatttttgtatttttagtagagacggggtttcgccatatgcccaggctggtctcgaacccctggcctcaaatcatcggcctgccttggcctcccaaagtactgggattacacacgtgagccactgcgccttaattttttaatttgcttttttcacttgaataattataagaacattatttttaatgactgtgtagtgttctgttttatggatgtaccatacttaattatttagtcataatttattattatgaggttgataaacatgataatcagattgagctcaagaagctagttatagggttgcacaattaatgaatcccaggtacctcgctgggttgctgaggctgctatttttttcctgcctgtttggaacactgtgtttgggaccaatgaggcaaaagaaattgaagagctgccattttcaattattctattagaagatacattgaagatttgtcaaatgacatagacacaacactaatccagaagattatttaatcaaaaaggcattcatttcagatatgaattcataaacatttgtaacgatcctcagtttgaagaccatatagaatccctgaagaactggaagacactatttgcttggcaaagagaagtccccagaccaactggggatgaaatattcaaagagataaatgaatactttgaaacatacaaggtactatggaaaaagagtggaagtttgggacaggtaatgacaggaagatataaaagctttacattaagttcaatctaaaactttattccaagtaacaggttgtcttattcatggagaagcagttgtaaattaaaacttgcctgtggtttggaatttcacattaaatgattacattaaaaattcaaatggtgaacctaactaaatccaagctcctacagtaccttcttttcacctttaggtgaagaaatgcggtgagctattttattactgattatgtggacagtccaaaggaaggttcataagcgaaaaggaaaaatttaaattattccatgtgagcgattcttactttgcagatttgttgaagtgtagttactggcttcaaaaagtggtatccttaactgacattttgaacacttgaattcactcaataaaaaaatgcagtgatcatgtggaaaatacattaaggtatatgacagagtttatggattcagagcaaaaattcagctttggaaaagtgaagttaaaatggttttttaagtgatgtttaattggtgttatttgaatcctaaagaagaattaatagtactagtagaggaaagtcagtgtgtctgtgacaaagctttagtattattttgaaatacttgatataaaaaagttcacgtttactcaaagcttacttaaatcatcagaataaattaacatgtttcttaattaaagaaaaggagaagctattagacttaaaaaatttttgcacccttgaaatacatacaatttgaagagattaagttgttggaatactggttaatggtgaaaaaggagttttcagtctatgaaagcaaagccttctcctttgccatttgcttttttgtagtggttgctatgtagaattcgaagaaaatattgttaaaaagtcttggtcaggagtagagtgtagcatgaacccaatgcattttaacgttaataatgaggaaaaagggaatgcatgataatttcatcaagtcagaaaaaaatggaaaaagaaaaagaggaaactgaagaaagtaactgatgaaagtaaggtgaaagggaaaacaactttttataccacctgtgaatgagattaattttcgtttccatactgaaagacaaatatattccaattaagccattcaaaataaaaaacaatttttttttggtaagagatgggatctcactatgttgaccaagttagtcttgaactcctgccctcaatcagtcctcctgcttcagcctcccaaagtgctaggatttcaggcatgagccactgtgcctggccaaaaccaaaattaagcaacaaaacaacaacaacaaaaattccagacagcctttaaaataatgataaaggttgaaaaattgtagatagtggtaggtagataagatttcaggaaaagtccaaagcaaatcataatacgttattttaaaggggggtttaaaatcctttaaaggtacaatgtgaagcattatgaaatgataaaatacatgttttttaaaaacattaattttattttaagttccaggatacatgtgcaggacgtgcaggtttgctacataggtaaatgtgtgccatggtggtttgctgcacctatcaatctgtcacctacatattaagccccgcatacattagctgtttttcctgatgctgtccctcctccaggacccagtgtgtgttgttccccatgtattctcatcgttcggctcccacttataagtgagaacatgtggtatttggttttctgttcctttgttagtttgctgaggataatggattccagttccatccatgtccctgcaaagtacatgatcgtgttcctttttatggctgcatagtattccattttatatgtaccacattttctttatctagtctatcattgatgggcatttggtttttttccatgtctttgctattgtgaatagtgctgcagtgaacatgaacatgtgtgtgcttgtatctttataataaaatgatttatattcctttgggtatatacccagtaatataattgtataacccagtaataggattgcagtgtcaaatggtatttctggttctaggtctttgaggaatcgccacactgtcttccacaatggttgaactagtttacattcccaccaacagtgtaaaagcattcctatttctccatagccttgccagcacctgttgtttcttgattttttaataaacgccattctgactggcatgagagggtatatcattgtggttttgatttgtatacaaaaaagatttgtatttctctactgatcagtgatgttgagctttttttcatgtttgatggttgcataaatgtctttttttgagaagtgtctgttcatgtcctctgcctactttttaatgggattgtttgttttttttttcttgtaaatttgtttgagttccttgtagattctggatatagacctttgtcagctggatagattgcaaaaattttctcccattctgtaggttgtctgttcactctgatttgctgtgcagaagctaaaagacatgattttagaaaaagacatgtcaaagtcatacatgctcaacgacatagcgagtacatatgtaaataaaaaattattttatgctgtgaatttgaccgaaaataacctttacctcgtcaggaattacaatcctcacgtatggtaaaggatttccctattgcaaattattccacaacattaatgttctgtgtgctttttatctatcccaagatacaagtaaatttgacaaagatattaggtttgtaaacaaatttacgttcaaatctttgcctggaagtatctagatagaattttgcatgcaaaagagtatttacatctaaaaaattacatatttcaaattaaaatgattttagtgttatagatagaaggaaagagttattgaagtttatttctgttttggcagtgtaaatgaattacttacaaaattttagaagtctacaggtgtttttataaagtttgtgttatttgtggaaacctcagttttctggcattttgccaatgaggtctactctaagtatagcagaaatttgttttccagctttataaatatatattttaagattaagaactgattttacttatataatctgggatcaacttttggcttctcctgtcaaggattttgaatttgtgacaaaatatacacttattgataaccagtgacatatataaaatgctttacaattaataaagcatatgtattttacatattttttcactacatatgacgcatgtggcaaccccaagagttgagttgtacccatcggcaaactttgatcatgattctgtgaatataggcaagcaccaattgcaggtagaacattctttttttgagtcccaaaccgtgagaaacaaattacagaaatgtacctttcttttgcattaggacacgttgtagttttgtatgaacactctagttttaagcagtatgtgcaaaaacattgcacaaaggatttgtgtgttgattttgggactcctgtattattaattatgtggtttatttgactaccccacattttcaagcataaattaataaatccataattccaggcttattaacaataaacaatctagatagttgaactctttcttgctaacattttctagatatggactgtttggtatttttctactaataaagacccttagtaagctgccttctggtttgatgtcattgggatgtttactgggaactttggtggagatcttgcagtctctctcccccagtggtgaaagaatgagttacaaaccagctttccttcccagtgtacaatagcgatggagtttgttctatatggaaaatttgtttgataaaagtattctttaaaattttttgttccataaattatcagtattttcagtttctgattcatgcttgggatagttgctgcatattgtttaattttgtcagaatttatattgttaaatatcaaatacgacagactaccctcaaatcataagtagttaatgtaattaacatcctgtttcatcatgagactcttcagtgttacattaaaaactgctacctcctgggccgggcgtggtggctcatgcctgtaatcccagcactttgggaggctgaggtgggcgatcggatcacgaggtcaggagattgagaccatcctggctaacatggtgaaaccccgtcgctactaaaacatgcaaaaaattagccgggcttggtggcgggcgcctgtagtcccagctactcaggaggctgaggcaggagaatggcatgaacccaggaggcagatcttgcagagagctgagatcgtgccactgcactccagcctgggcgacacagcaagactccgtctcaaaacaaaaaacaaaaaacaaaaaaactgctacctccttattacaaataggaactaaagttgaagtttgaggaatttgctaagaactaagccttgaactaaggctattttatttgagtatgagtcatatcagggtacggatccattttactattaacaaaacaaatatgttctgttttttttttttaaatgcacacaccacgtttgagagattcttattcactgtattttctttaattatacttgaattttggtttacattgaggagtgccctcaaagatattaacagatttttaaaaaatcctctaaaaaactcattcttagggaaatttgttcacttactaggtgaggagcaaaataaaaatccttaatatagaagagctattatctgtcttcaaaattaagtctttgagtagatttgtgaataaatctaatagttttgctgaatttacttagatcttaagacagaataatcatgtagaaaatttaaaatgtcaggaattcataatgattcatatacccaaggattttcattgatagtgaggtaaggttattcttgagaaagactcaaagtcataaaataatagaatttcgaaactaccagaattatacaagtcaattaaaatgactgatttgttttaagaggaagaaatactaaatgtataattattagatgcagcatattgtatctgttttgttttgtgattctagctcttataacctatgcttggacctaggtgtcataacttactttaaatatgtatgtttggttttcattcatattgacagtactacctctcagttttctttcagatattgttttgtatttacccatgaagacattgttttttggactctgcaaataggacatttcaaagatgagtgaaaaaaaattggaaacaactgcacagcagcggaaatgtcctgaatggatgaatgtgcagaataaaagatgtgctgtagaagaaagaaaggtatgttgttcattgactattcttttgggtgagaaatttaatttatatttgactgtgcaaagagtcagttgttacttgtaaacttcaagtcattgtttaggtcagagttgctgttgtctaaatgcaccaggacctagttgttgaaagggtaaactggaataaactttaattgggtttacaaaatgagaattcttactgtatattttctctttttcgggttgactttaccagtttgttctagttcagataatttagacaacattaactttgttgaattttttgtttgccagccggtcttcagcattttaaggcaacattattattacagttgtaatacgaatataattaccagagaaaaaactcaggaaaataaatgcttttatgaaaatgggattagaggtttgaaaataaacttgttaggagaaataatttcacaatgggatggttttttctttgttaagttttctttatgacttcattagtttataaaacattaattgataaaacttagaactataaattgaatgcttcagtgaactttattatttcagtgaacatttgttatttgatgtgaactttgtgcctgttttgaaatttactaaactcaaggcatgtgttcggaagagtgtttttgaagatgacctccccttcttagaattcactggatccattgtgtatagttacgatgctagtgattgctctttcctgtcagaagatattaggtaagtgatttgaatttcctgattttatttgaatttggacccttagaaggtactattatggtaatgtttgtgaatatactgagttttacaggtgaggtgtgttcaatagataattatttctatgtatacactatcaccaagttttacatttcaaataaaagtcactgaattaatttgtaatctgtcagtttgttcattcataagcttttctattacttcagacagtttttttttaacttttttaatatatgtgctgctgaagcgagcacgacagttttttaactttcagtacttaagatgttatatatagagctactgaacatactgtgtttattttaccaatttagggaaaaagtgcaaaaattatttaacctttaaatgcacctttatatttcattaaaaatatcaacatagtaatattgaataatggctatgatcggctctgttgtgtgtaattagtaacagttgtagcaaatgatccttaaaaaatgttctaactaaacattagaggccaggcgcggtggctcaggcctgtaatcccagcactttgtgaggccgaggcaggtggatcacaaggtcaggagattgagaccatcccggctaacatggtgaaacaccgtctctactaaaaatacaaaaaattagccaggtgtggtggcgtgcgcctgtagtctcagctactcaggaggctgaagcaggagaatcgcttgaacctgggaggcagaggttgcggtgagccaagattgcatcactgcactccagcctgggcgacagagtgaggctccgtctcaaaaaaaaaaaatccaaaaaaacaaccccacaaacaaacaaaaaacattagaaatgtctgttagtacttttaaaggttgccttgtaaaattaggactgcaatagtgcaatctaaggctctcaaagcataaaacaagtaataaggaattcattcagatattttccgaggtggttatacctgtcttttaaaaaaaaaattttgttatatattgggttaaaaaaagcagaggtgctgggcacagtggctcatgcctataacccctacactttgggaggccaaggcaggaggattgcttgagcccaggagtttgagaccagccatagtaagacccccatctctacaaaaaaatttaaaaattagccaggtgtctgtggtcccagctactcaggaggcctaggttttgggcccgagaggttgaggctgcagtgagccttgatcacaccattgcactccagcctgggcaacagggcaaaaccctgtctcaaacagacaaacaaacaaacaaaaggcagaggtaggttaagctatttattaatggtcttctactggtatagatataagctagaaataacattcaagtgtttttacttttactacagttatctggccactttgggactcattatactgaattagtttcacagaggaggtaaaatctgttgtttatgattacatattaactctaccattttaccttcagcattgctgtagtatgtcatatctgaaggcaattagcacaagtgacttgaagaattgtagttttgatgacttatatgtattttataaaaggcaggcagagtttttgtgtttgctttcccctcctctggacactttaaatttttgctaccacaggtttccaacaatttgattatgatgtgcccttgtgtaatgtggttggtgtttatttggcttggagttcgttgaatttttttgatctgtgtgggcttatacctttaatcaaatttgaaaaatgtcttcagatcctttttcctcccatcctgttattcttttctctttctgggactcttagtacacacaagtttgattgcttgatactgtgtcacaggccactgaggctctttcctttcagtcttttcttctttcttcctttttttctttctgtgcttcattttgaatagcttgaatagttttgtttcctgtcttcaagttcacttatatttttttcttctgtagtgtctggtctgtttataccatcctgtgaatttcttttttagatactacatattttgtttatctctagaagtcccatttggttcttaatttttttttccattttggctctcattattcatgtttctttcaaaattcttgaacatatttagcatatttttaatagctgttttaatgtacttgtctgttaattccattattctagggtttttttctttctattggatgatttttctcctgattatgggttatattttcctgtttattcctacagctgttaatttttttttttttaattaggcattgtgatcttactttgtggaatgttagattttattgttttcctttaaagaaaggaactttgtcagacatctaagttacctgaagatcaactttatgttttgaagcttgttttcaagcttgatcagggaaagtctacgtttgcctttagtctaaaggtaatttagccctataataagatgtgacccttctggagtctttgtagactgcctctggtgatcaacgatctcttctctgacttttcagaacgttaatgcctcttacctttgtgtaagtccgtcctaagaatcattcagcttatggttgtttgcccagccccatagagttttagtctatgcatgcttgtcttcgtattctgcaaagaccaaaggagtcccttagggagatttctggagctcttttcctgcctagcttcctcctctccagaactctgccccgtgagttccaggtccttcagcttccagggctctgaactctgtctccccaactcagtgctctccttgggattcttctccctgttctgttgtctgcaatgggtcccaggaagaatgtggggcaactgtaaggttcacccttcatttcccttcccttagagatcatagtcctgtactgcctgttgtctagtatctgaaacagttgttttatatgttttgtccaagtttagatttgtttgtggtgggagggtgagtctggcctcccttgttatatcatgttggcctgaagcagaagctgagtttcttttattttttaaatatagtttcaatttttaacaactattaaataggcaagtatcaacaacaatagataacaatataatagatatgcatattcctcccactttatcaaatcttaattttcttcaatttttttttttttttttaatagggtctcactctgttgctcgtgctggagtgacagtggtgtgatcttggttcgctgcaacctccgcctcttgggctcaagtgatcctcctgcctcagcctcctgagtagctgggactacaggcatgcaccatcatgcccagataatttatatatatatttttttatagagatggggtttttgccatgttgcccaggcggtctcaaattcctggactcaagcaatctgcctgccttggccccccaaagtgctgggattacaggcgtgaaccactgcgcctggcctgttttcttcagttctttattaagaaatgaaacagtaaaatacagctgaagccccgtgtttgttctttctgattctccctctgtgcccctctgagataacttctatgagttttgtgcatttttttttctttttaataaaaacagggtcttgctctgttatccaggctggagtgcggtggcgagatcatactcaatgcagcctcaaccttatgggctcgagtgatcctttcgcctcagcctctcaagtagctacaactactggtgtgtgctgccatgcctggctaattttttatttatagtttttaaagacagggtctcactatgttgcccaggctagttttgaactcctggcttctagtgatcctcctgccttggtctcttacttaaagcactgggattacaggtgtgagccactggctgctcacatgttttttataatagtacttaataattttatgtctgaaaatattatataatgttattttgcccatttaaaaactttaaaaaatgctaacaaactgtgtactctgtaacttgtcttttttactcaacactacgtttttgagaatttttcttgttgatctgtgtagttccattttaactgttatatcttactatgtttcattatgcaacagttggttcaatccattctcttgttaatggaaatttagtttgtttctaatttttgccagtaggaacagtgttgcaatgcatattcttaaacatgtctgtacacatctgagggtttcatttatttgtgacaaaacttgccaggtcatagtgtttatgcaccttcaactagatattgtcgttgtcaaagtttttttccaaaaggattttaccaatttatacatgaaccaccgatagatatcctcttaacacgtggtattctgaaacttaatttttaccaatcagatagatgtgaaatcacgtagacttagtttgcatttctttgacttctagtgagaagtagtgtcttcacatattttttggatttttaaaatttattttttatttttgtttttcttagagacagggtcttgaacttttacccaggctgaagtgcagtgatgcgatcatagctcacgctaacctcgaactcctggactcaagtgatcctcctgcctcagcttcctgagtagctgggactacaggtgtgtgccaccaagcccagctaatttttaatttttttttttgtagagacatgctgtgttgcacaggttggtcttaaactcctagtctcaagcagtcctcctgccttgactttccaaagtgctgggattacaggggtaaaccaccatacctggccatatcttttggatttattggtcatttggattttcttttgggaattacctgttcatatttttctccatttttctgctgaataatttgtcttttcttacttatttttcaagaaattttacatattttctggctgttcattgtcagttgtatgtgctccagataacttgaacagtctgtggttgccttttaatttttgaattatgtctttagttatgcagaagtttaaaattttaacataaattaatttacactatttttctcactttagcatgagtctatcagatggggatgtggtgggatttgacatggagtggccaccattatacaatagagggaaacttggcaaagttgcactaattcagttgtgtgtttctgagagcaaatgttacttgttccacgtttcttccatgtcaggttggtatctctacatttcatttttatatggctgataattgtaatatgtcaactttatccctataaaattaagttcttttattagctggccgttctctcattatctcaaatttatttaagtatttatgttctacctgattcactcacattccttgttttatttaattttcacaacatacctgtgaggcattgacattttttctgttttagagaagagaaaactgaaattttaagaggctaaatgaccaggatatgtactgctattgctagcaggagtggcattcaaactgattattttttcttgtcatttatcaatcaggactgtttgctttagttaagaaatactcaaggtcaatgtgtttctgaatttaaaattactgttaaatacaaatttacacataaacatggtatgtataagaagtaggacataaatccatcatacttgacagaacttatggaaataacaagaaaatgttacagtttttccccagggattaaaaatgttgcttgaaaataaagcagttaaaaaggcaggtgtaggaattgaaggagatcagtggaaacttctacgtgactttgatatcaaattgaagaattttgtggagttgacagatgttgccaataaaaaggtaaaagcaatatatatataattttcatgatgaagattattttgtgttacacagaatgtactttctatctgaatgttagatttttttttgaaaaagcttgttatataatgtttttgtagcaataaaaaagttccaagtgaatgttctttaatgaaaacctttatttatttatttatttttaacttttgtttcaagatcggggtacatgtgcatgtttgttacacaggtaaacttgtgtcatgggggtttatcatacagattattttatcacccgggtattaagcctggtacccattagttatttttcctgattttcttcctccctcctcccaccctccacctcccacagtgtgtgttgttcccctctgtgtgtccatgttttcttatcatttagctcccacttataagtgagaacatatggtatttggttttctgttcctgcgttagtttgctaaggataatggcctccagtgccatccatgtccctgcaaaggacatgatcttatttattttttttatggctgcatagtattccatggtgtatatgtaccacattttttttaatgcagtctatcattgatgggcatttaggctgattccatgtctttgctattgttaaatagtgctgcagtgaacatatgcgtgcatgtgtctttgtaacagaatgatttatattccttttggtatatacccagtaatgggattgctggggcaaatggtatttctttctttaggtctttgaggaattgctacacagttttccacaatggaaagcctttagttctaatccatgtcttggcatagagtttcttttctttttttttttttttttgaggtggagtttcgctcttgttgcccaggctggagtggaatggtgtgatctcagctcactgcaacctccacctcctgggtttaagtggttctcctgcctcaggctcctgagtagctggggttacaggcatgcaccaccatgcctagctaattttgtatttttagtagagacggggtttctccatcttggtcaggctgatctcgaactcctgacctcagataatctgcctgcctcggcctcccaaagtgctgagattgcaggcgtgagccaccgcacctggccggcagacagtttctttttttctttttgagacagagtcttgctctgtcgcccaggctggagtgcagtggtgcaatcttggctcactgaaacctctgcctcctgggttcaagcgattctcctgcctcagcctcccgagtagctggcactacaggcgtgccaccacacccagctaattttttgtattttttttagtagagacgaggtttcaccgtgttagccaggatggtcttgatctcctgacctcatgatccacctgcctcggtctcccaaagtgctgggattacatacagtttctttaagcaagccttctcttttccttcctcccagttcttggtactctttcactttcatatatttgcaaatgtaaaattgtgttttaggtgtatatttttaatccatgtataccagtaacttaaaaaaaaatttttttttttttaagggagagcataatggagctcttgtgatacggtgctcttagtggaagtttggctatcaattccatcacctgtatttcacatattttattaatgaagttcttaaattaaattctcatatttagccaagtattcatttggctgggaggtagaaagcctactaaccaactttttttcatgaacaatatttttaaagtccaagatttttaatacctacattagggaaattctagaattaaattcttacaatgtggactgcatatgaggcttttagtgacagggaatttgttgaaggctatctgtgggttgtattttggtataacatttcctaattttatttgtggtatgttcatttgatatcatttggtaatacctgaaaacaggaactgattttactgtgttgctttttcatcatttctagctgaaatgcacagagacctggagccttaacagtctggttaaacacctcttaggtaaacagctcctgaaagacaagtctatccgctgtagcaattggagtaaatttcctctcactgaggaccagaaactgtatgcagccactgatgcttatgtacgtgcttaaagatctttagaaattgtgatgtgttttaaaaacattattataaatgactttagaaaaattttattatagtagtggcagaaactctaccaaaatattttatatcaatttggcattgaaaaatgcttaggaagacatttagtgaaactattcattttcgatattaattagcaagtaccaatcaacagattgttcaatgctagtttattttcattgtcatgaagccaaattaatgtctaatttgtatgttaaaaaatgtgaacttgctgaaaacatgaaaggctaataaatccaggctgagcaagcataaatagtactgatgatggatttgatatataaacaattcagaatgaaaataattatagtacagtttctattttaaaactggccttatttcttatatataaaatgtggtgaaattttagaaaaattgcctccaaatttagcttgttgctgccattagatatatttttatatttacatgtttgtatgtagtgaaatctgggcttatctttatatatagcactattgtgtgttttttaagaaatgtattttattccacagtgaatttgttttctcctaactcatgctttcatttgtagatgaatattttattgtttctcctttgcatctatcaaaggaatggaaactcctttgaattgtaaccagcaaacaattcacttttgttagggaaattggatgataattttcctttaaaagataccgccaaacttgagactaacattctcagctgatttaagtaggatttctcttactagattgcattttgttagattccattttaagttattttatttggatattgtgtgtaatattgagtgtgaaaaagtgaaaacaaacttttaaggctcaggcacctttctcaattttcacaattggtatgattattaaatgaggacatattgatatttgtgtcacataataggttgaattccatgtttgggtgctttgtgaatcattctcttcgatttttctgaagatgggacttactgttttatttcggtgatctttagcatactttttaaatttttctgtttttttataggctggttttattatttaccgaaatttagagattttggatgatactgtgcaaaggtttgctataaataaaggtatgttaagatccataaataaaatgtgaattcactcttttgtgaggtttatctccaaaaaaggcaatattcacatatttgcaaagcatttagtactataacttcttgaatgtctgagcagtcctgacattagggtgggatccatcagggcccaagatgagtgtttcatctttgttacttgtggcaaagcagcccttacttcttttactttgtagcattgctatgtatttggcttctagagttggggctttgtggctttcttattgcagtgacacaaccagctttctcctagtctggagattatacatccttgctataagtatttaaaatgctttctatataatgctttaaaacatgtaagatggcttatccccaagatggtagctaataaacactaagtgataaagtaggtaaagatctatttattcatttattaaatattgttggtcattttacagtgctttctaacatactgatttacatttctaattttcttctgtcatttttctccaaaaataatggtcatgtcatccaacctcagtgctgtttttagaggtcttgataagccagtgagagcagaaggagccacgtagtagagtgggtgagcccaggctttttgttgcacagaccaatgtgaatcccagccatgtgacctgggatgtacctgtttctccaaacatggaatgtagatactagcataatgtccgttttaccgttttatagaataattgtgaagacttaaagggacaaactattcgaagcatctgtattgatataaagttatcactattctcgtagcttccttttggagattttaaatgattgtgtttgttaagatgttaattaaattaggccattttgctaaatgctcttaaaaatatggcatgactgcctcatataaaatgatatgatattctttataattgtcgttgagcctctgtgggtggcaggccctcctttatatgttaaggtagaagagtctttattcttacttctcctccctggagagccacttcctatgaatgcctgctggttctctgtagtcagaggtcttgtggctgtaacttagagtcagtctccatatccctgggttctgcatctgtggattcaaccaaccacagattgagaacattcaagccaaaaaaaaaaattcacagttttaaaaaaggaaaagttgaatttcttgcatggagtaccacattgaatctatatgaatgaagtgatgcgtaggcattttataaggtattataagaaatccggagatgatttaaagtatacaggacaatgtgtatagattatatgcaaatattgcagcattttatataagagacttgatcatctatggatttgatatcagtgggagggaggttcctggaaccaatccctcaaggatacagaggaatgactgtatgttaattaactgaggcaggtgatcggttttttaagctgattagggaaacagtatataagaacttacttaactcataataaaactaaaattcaacaggggagagttatgattttttggctttatggttgtggaattgcatgtaggttacatgtacaattttgttacatgtgcaattttgatgaaaatgcttccaaggaatgtttatgatatttttcactaaagtaacatatattaataacacagtactggaagtcctggtatctgtgtacttgtcattgtaatgctacattatttgaccttcactttttttcccctttattacattatatgtgtgagtatattgtgacatcttgactcagattccagtgaattgtattaggttggtgcaaaaataattgtggttttggtaatttttaatggcaaaaaccacaattacttttgcaccaacctaataactaagattaccatctttttttccttccttcctcccttccttcctttctgttattcagccagaagtatcagcatcactgttctcttattttcttcatgtacatatggatgatattttcgaatgaccacttttctcttttgctttttattattagactgtttttttcttcttgttaaaggataaaaagattagaacataaaaggatatttacacattgtttccccattgacttattcccaagatggtagctaaaaacaccaaatgatatagtagttaaagatacattgactcatttattaaatattgttgagcattttacgatatgggaataccgtagtgaacaagccaggcatactctgtttcctgaggggcctacagttttattggggatatagatgagtgaagaaagcaattgcagtgtagggagatgagtcttatgtcatgggaaaacaaggtgctgtagttgacacaccgagaggcatctgacacattgggggaaatattctagaatatttcctggagaaagtgcaggtaaaagccagacctgaaacctgagcaagagttagctaaggccaggtgcagtggctcacgcctgtaatcctagcactttgggaggccgaggtgggtggatcacctgaggtcaggagtttgagaccagcctggccaaaatggtgaaacaccatctctactaaaaatacaaaaaattagctgagtgtggtgacgggcacctgtaatcccagcttcttgggaggctgaggcaggagaatcgctttaatctgggaggtggaggttgtagtgagctgagattgcaccattgcactccagcctgcacaagagcgagactctgtctcagaaaaaaaaaaaaaaaaaagttagctagctgaagagtataggaaagaatgggtacaggaaattacaggtgccaagttacagaggtgagagaaattatggtatctataggtaattgaaagtaattcagtatagtgaacattgaatagggctgggcggatgaaggcaaagcagaaaaaggaaagcagatgggccatggtaaggagtttatatctcctcccaagagcaatcgaagtgactgagagttttaaacacagcagtgaagtgaattacattaaaaaaataagaacttgggctctagaataaaaaacggatataggaggaaggcaggagtcacagtaggaatatcttttgggaggctgtgacaataatccaagtgagaagtaatggcaacttgagtcggttaattgtgttgagaatggagagaagttgacaggttcaaaattcatttttcttctttttttgagtctcactctgtcacccaggctggagtgcagtgatgcgatcttggcttaccgcagcttccacctcctgggttcaagtgattatcctgcctcagcctcctgagtaactgggattacaggtgcctgccaccacgcccagctaatttttgtgtgtttagtggagatgtggtttcgccatgttggccaggctggtctcgaactcctggtctcaagtcttccgcccacctcagcctcccaaagtgctagaattataggcatgagctaccacacctgacctcaaaatacatttaatagagcaagcatgagccactatgcccagcctcaaaatacatttaataaaccaatggaatttgaggtaatgatgaaagacacatgtcaaggatcattcctgtgttgttggcataagcaacagggatgaaaagcattgaggaagagcaagattttgggatgcgttgtcacacagttgattttaggtatgttaagggagggagacctgtaagacagcaaagtggaggtggtgcaagaattagttgtgttggctgtagcacagaggacagtttgagttaagagagttgggactgagaatcccgaggaactcttagtgttgaacatttgcgtggaggaggggacaccaaaggagttgccatagacatcgaggaaattaggaggtgtggtgtgcagaaagccaagtgaagaacatgttttaagtaggaggatgctatcaactgttttaaattctgctgagagtttgagaaactgaggacttagaattcatcattagatttggcaatgcgccaatcatttgtaatcttttaaacaatagttttgctgtactgggtagcaaaagagtgatttgaggagtggtcatttggagcatatgctattcaaacagagaagagtccacgggctttggtaacatgaaggtcctataaccatagcaagagaatgaggtgggtggaagtcatattaacgtgaatagaggagtaggttagatctgaggaatgtgggaacagagacagggtctcattatgttgcccagcctggctcagactcgtggcctcaagcgatcctcctgcctcagcctcctgaatacctcgggtttcaggcctctgcatctggcttgaaaacaacattttctcagaagcttgttttagttgttttagaaataacgaaggcatgtgtaaacaactgttctagaagcttagtttggaaagggaacgtttattgatgcatataacacttatatgttgggtgcttatgtgtcaggcactgttagagttgctcgggaaaatttacaaaccaagcaaaccatgccccttcatttcctttgggtgaagtgagggagccatgtggttatctgaaggaagagcttagcaggattagagggaagaaagtgcaaagcctcctagggtgattggctggctcttttggaggaacagtacctataactgaatgaaatgagtgagggtaagagtggcaggaaatgaggctagaaaaggagcttgggccatatcacgtagggcctcgtaggctgtgaatctgacttcatttcttattaatgaaaataaatacgatgatgggtgatgggaaacccatagaggatttggagcagaagaatgatataattaaaattttattttagaaatatttttctggttgtcgtaagaggaaaaatatttagccccagggcattttggcagagagttaggaggctattgtaacagcccaagcaatagacaataattgtttggattaggcgggtagcaatagaggtgatgagaagtcgtagcttctgtaggtatttggaagatatatattgtgaaggatttgctgatgaattccctgtaaggggtgagatgtaaagattcatagaacattaagatattttggtcagatcatctgatcaatggaaaggtcagttatagtggacagattatgagaagaacaggtttgggtgagaaaactttagatttcagtgttggatatcctaagttttagatgattattgatatccaagagatatcaatatttgggatcaatttgggaaatatgatcccaaagttcaaggttgaggttggagatgtaattcagatccgatggtagttaaagcagtgagactgaatgagataaaatagggagtgaatgaaataaagagtaggtgtgatattgacctcaagggcacaccagcatttagaggttgggaagatgaggagagagcagcaaagaggactgggagggccactaatgaaggagggaagtacaggaggtgtttagttctgaagccacctgaagaaaatgtttggaataggaagaagttgtcagttgctttaaatcattcggggaggttgagtgagatgagagtctagaactaacagttaggtttgatggtgtggaggccatcagtaaccttttctttcttttttttttttgagacagagtcttgctcagtcacccaggctggagtgcagtggcgcgatctctgctcactgcaagctccgcctcccaggttcacactattctcctgcctcagcctccggagtagctgggactacgggtgcccgccaccatgcccggctaatttttttttttttttgtatttttagtagagacggggtttcaccatgttagccaggttggtctcgatctcctgacctcgtgatccacccgcctcggcctcccaaagtgctgggattacaggtgtgagccaccgcgcccggcccaagagtaaccttttcaaaagcagctttgctctactgatttgggtaaaagcttagttgcagttggtttgggaggaaatgggagcagaaaatttgagagagtgagtgtagacaactctttcaaggaatttcgctataaatgggagtagagatctgaagactgaataattagcaaactgaaaagtgggaagacgtaattctcttattatttcatttttcttagtgaaataagaggtgaagttctctgagtaataggagggtcaaacaggtgttagaagttcacaaagaaaggaagaggtttgaaatagtcattttgagagtgggaaatgtagaagaattaacagtcattgctgagggtgcgtttgaaatctgtcatgagtttaaaataacttgtgtcatcatcgatgtgtttattttcaactatattcaactgcttgggtgtaggcatcaggtaggtaaaaaaagtgggttttattatgagtagaggttttgccacgtaattaccatggagggagggaagagcaaaggagttgagagtatagatacaaaggaatgattactgtaatgtgggtaagagaggaatggaaggctcagtgggcagtgggagtagggatgttgataggtaaggaaaaggtgataggatcaatgcatttggttctgcaagtgtcaaagtattgttggggaaagcatgctggaaggaaagatagggatgctggtgttctcagggtggaaggcttacagttgtagtctggaagtggtgattttattggcaattataaggtcaacggtatgactatggaattgagtggctaaggtctgttgaagaaaagattgtcggaaatgcaggggtcaaggaactggcctgtggatgttgaactcactggcagtgatcaaggaatagtagtggagtgaaagtagttaatgaatcaggcactaagatctccaagggatgaaaggatgcagtttggagatgacaagataactgtagtaatcaggaatagcaggttttgtagctctgtctcataggcctcagaggagatgggcttttgaaggacaagagaaatgatgatgaataaattctaagcaggggaagtgtttgggaaagcagggcaggctttgtgctgttgatggcaaatgatgtaccagacaggatgaagttgagaatttggaagttgatcactgattagaaaggcttacattttattttggccgggggtggcagctcatgcctgtaatcccagcactttgggaggccaaggtgggcggatcccttaggccagaagttggagaccagcctggccaccattgcgaaacactgtctctactagaaatacaaaaaaaaaaaaaattagctggtcgtggtggcacatgcctgtagtcccagctactccgggggctagggaatgagaatagcttgaagccgggaggtggaggttgcagtgagccgagattgcgccactgcattccagcctgggtgacagagtgagactctgtctcaaaaaaaaaaaaaaggaagggcttacattttattttggtgctgactgggaatgaaggcaatgagggatgactgttggagaaggctgtgcttactaaacagtattattaagtagcagcatacatggtgttatactgacttctgattttgcaatagtacagacaggttcagattctcatttccaccttctccttctgcctaggtgaataactgctgggttatagtacagatgactgcagatcatttggaatttactttaaatgtaaacagtaaaaatttgaaagagagggaaagtgattgaggcaatttggggattgaataagaaggtctttttgttggaattcatttaaggaaagaaaatgaaaatttgatccctaatattatttaatgaagtggctaaatgaatatctctgctttgtggtttgaaaattaatattgattttttttccccctagaggaagaaatcctacttagcgacatgaacaaacagttgacttcaatctctgaggaagtgatggatctggctaagcatcttcctcatgctttcagtaaattggaaaacccacggaggttaaatattaccttttttttttttaacttaaatcaattctgtttatttttttatcacattttcctatatgtgaagaatactattcattaaggctgactcatagaaatttgcttgaatacacacacacagactgatgcataaatttgagaaatatctttccagttgttgaatagtgaatccaaaggtttaagccttttctgtctgctttgtaggatgttttatgaaacaaaggaatagaaattgtattcatattatacattttgaaattatatctatattatattttttgtcaaagcaaaataaattatacattaaggaaaatatttaagattcaaagttgtcattttctttctgttaatgagtatctttgatttaataacatttatagtttggtcacttgaaatctatagtgaccaaaagcaatgtcatatttagtagcctcatttctgttactatctgattattacttaagaattctacttaattaatagattattagaacaaaaggcattccaattttagagattcttttatggttaaagcactaggtaacttaaaaaatttggatcaaatgttatacagattaatagaccttggaatacaggggctatgtctttttggaatcagaccttgtcctggccttaattgcaggatgacttccttattaaatctctaaaagcaggaatgctctggaacaatgaacaattagaatgtggtaatgtaattttgggccaaaaaatactttgtagaaatgtgattctcttacttggaatagaaagaattctgactcgaaaaagtgcagttaatgtatgcttttctgggtaagatttgtgatagattttgattgagatttaaaaccatgatatataaatttagcttttttgtcaaagtaatttgccaccctagaatttgtgttggtaatttttaatgcaacttggacaatttctgaaagatgtaactttcttttttttgagacgagtctcgctttgttgcccaggctggagtgcagtgacatgatctcaggtcactgcaagctccgcctcccgggttcacaccattatcctgcctcagcctcccgagtagctgggactaccggcgcccgccaccccacctggctaattttttttttatttttagtagagacggggtttcaccgtgttagccaggatcgtctcgatctccggacctcgtgatctgcccgcctcagcctcccaaagtgctgggattacaggcgttagccaccgcgcccagcctgaaagatgaactttaaaatggggaaggatactagtaaagccatttcttactcatgtatacatttttccctccatgaaattagagcagccaccttttacatgacttttacatgcatttcagatttttgtactagcaattaaaatatctactggatgtaaatcacatgtgcttaatgctttgcttcataatatctgttgaagtcaattaaaatatagagacagatctttaaattgaacatgttttatttgggaagcaagaattaaatttgaggcatatacacagactgggtgtccttggtatctctgaagaacaaagagaagtttggaggttatagaaaaaggaaaatgtgacattgtttttccagaaagttctttggcactagtaaattttggggagttggaagctctgatgggttagtgactgtggtgggtaaaactagtcttagagtcacaacaggttgtttcagtatctattagataaaacaggttttaggttacaataggcagtttcagcagctaggcttgcagaaaattacattcttagagtaatgttatgtgccttgagtgcttttttccccttggcccttgactctgatttagttgggtatgacaagaattatcaatttatataattactttttacatattgaagctgaataggttttcttaaaacttggaaatgggaaatactgggtcttgtgaagttttagtgtgaaaacgataactagtctcttatttcatgctctttgtaacaagtctacagtaatacctaatgtatctagatgacacctcagaaccaggagggaacaaaaaagacctctgagcagtcaaaataatgctataagcatgtattccagcttactttcggcatttctgtggagtgcaggaggccacattttgttcatagatccagtttgacaagcttgggtactgagttaaagtgaaaatggtgtaaataagtaatcatattcacatgacagtaggtggaagtgacagctgacaatctgaaagagtggacaaaactataaaaattagaactaagaactcttaaaatagaacggtttgaagtttgttacagaagggagcagctttatgcttcagtggactctgaaggtattggcagtgtatagtactgcttagtcattgatttaaattcggtatatatctcttctattgctgtcatgtacttgacattctgctgggtgctaaggctgtctgcaggctactaatatgcataataacaatcctgaaaaagaaggaaaagtatactgtgccttactgaagaaggcaggacagccgttggtatttgttagagtaaatattagttatcttacataaagcatgttatattccctgatgtcagggcctgataaatgagcccttacactcttgatagtcaatctgtgccactgttgctgtgtttgtatgttacaccatttcctgtccatgtaacagttaaactgtatcacatatctgttcctactaaactatttgcatataattttaacatttgagtggctgtatataaagctaaaagttctttataagatttatagcatcttagaatgtttaaattagataacattagtgtgcttttagtttttgaatttaattttgctcttgattttgtttgtgttaatgtagactttgtctacgtaagcttgagcccaactttggagtggtgttttcagtgatggaagtaactggaaataactcatgaaaccacttagtacttttgatagtttattcccatgaaggatcaaatttttacttgagtcattaatataaaaatttaaaagacatgtcagattttattaagcatggattttaaatatataaatattagaagacctaaacaaaatcgctaatgaaagagtaaaacatgtccctgcctatcatactcccttcactttcactgatttctgcttttatgaagtactttaataagctctacaacaaataaacaagacattgtgcctcattttacactctagcagtggttttccattccaactaactagattgggtttataatatagtcatttaaacttacttagttaaaatgttatacattagcaactgcaattaaggagctaagaaattcagctcgtatttatttatatgcatcttatccatagtttctcacttgttatatttgcctactgatggcaaattgattttttctgttccaaaaatgtagtgttttgagatttttggagatgcaaaacagcatcattttcaaattagatcacaaacaatcttacttgttgcagttgagactagtaattgatcagtgaggtgaaaaaattaggcaaaacggtatcatcaaaattttctttctttttttttttgaaacagagtattgctcttgtcgcccaggctggagtgcaatggcacgatctcagctcagctcactggggcccctacctacgggattcaagggattctcctgcctcagcctcctgagtagctgagattacaggcgcatgccaccaagcccagctaatttttgtatttttagtagagacagggttttgccatgttggccaggctggtctggaacttcagacctcaagtgattcacctgcctcagcctcccaaagtgctgggattacaggcatgaaccaccgtgcccgccccaaattttcttttaacttaaagtgttaatgtttgtttgttcccaatatttttatatatgtcaaggctttttcattatatacaggccagctctttggagttctgcatagtgtttcttgtttaaaccacacctataatgtaccatctacaatttccaattctttaagacagagtgaaaaattaagacacctgaagcaatctgagtgcggagtcctaggcattatgattttccttgacacttttagggttcttttatcacagtttatcaaacacctttttttttttaacaaaaaacaaatttacaaaatctttccatgtattcaacttagaatttaatgaaatagggtttttttttttttggtggtcatgtatcatcaactttctttacatttaattaaattaatcaacaaaaaacatatagttgacataaacaaatttgggaccaagcactactgactcttagtaaacatacaagtcaactgttggtgcagaagtgccttgatgctagagagtagcctgcaagctgtaattatatatgggcattagggaatgaagaacagccttaatactattgatcttttaagtgaaggtcagcttagaaagcttttacttgttaaaaagcttcacagtttgtccttgtagttaatgcaattgaagttgaattaatctttcttaattttttttttagggtttctatcttactaaaggatatttcagaaaatctatattcactgaggaggatgataattgggtctactaacattgagactgaactgaggcccagcaataatttaaacttattatcctttgaagattcaactactgggggagtacaacagaaacaaattagagaacatgaagttttaattcacgttgaagatgaaacatgggacccaacacttgatcatttagctaaacatgatggagaagatgtacttggaaataaagtggaacgaaaagaagatggatttgaagatggagtagaagacaacaaattgaaagagaatatggaaagagcttgtttgatgtcgttagatattacagaacatgaactccaaattttggaacagcagtctcaggaagaatatcttagtgatattgcttataaatctactgaggtactaaataaagaggaagcacatttttagttattagtaggttctggcagactttattcccgtaaagagacagatagtaaatattttaggctttgtgggacatacagtctctgttgcagtaactcagttctgttattgtagtgtgaaagcagccacagacaaatgtaaacaaatgtgcctgtctttcaataaaactttatctacaaatacagatagtgggccacatttggcttgcgagctgtagtttgctgttcctgacttagtatgatatgcagcattgtgtagtggaaagattttatagtatcaacagacatttgtaggagtttgctattttataatttcgtatgcttttttcataatagatgtctctgctttttgtggattctcttcatatctactagtgtttactcttctgactttgatttttgggggtgtattttatttctttatacagaatttttttcttttttctttctttttttgagacaaggttttgctgtgtcaccccagctggagtgcagtggtgggatcttggccccctgcggtcttcaactcctgggcttaagcgatcctgtcacctcagcctccctagtagctgggaccacaggcctgcaccactacactcagctaatttttgtattttttgtagagatggggtttcgctctgttgcccagactggtctccaactcctggactcaagtgatccacctgccttggcctcccaaagtgttggaattataggtgtgagtcactgtgcctggcccagaatttctttacttgctcatgtgagagagtttctaataaactcctgatgcttttgcttgacactatagttttactgtcatctcagagtcagattttttccttaatttcttcattaaattgatttcttaatttctcatttgttttgcattagtttacaaaattacttaagatgcctatattctctgaaattttatattttatttcacgataaataagtttaaaaaattagatttgaccatttaattagagttatttccccatcatttttctaatggcaacaataattttagcatttgagcaattctctgtattttggtaactattagtaatcacttttatcagtataaacatgcatttcattttaaaatggttttcaaaatattctcataccaaccattcataaaagatgttccccttctgggaaatatcagtttttgctaacatctgcatttccctttgattttctaggaatttcttattaggtatacactttaagtgatatgtttcatataatattataggattatcaggatttcatgattttttttttttgagatggaatctatctctgtcgcccaagctggagtgccgtggcgcagtcttggctcactacaacctctgcctccccggttcaagtgattctcctacctcagcctcccgagtcactgggattacaggtgcccgccaccacacccggctaatttttgtatttttagtagagaaagtgctgggattacaggtgtgagccactgcacctggccttggatttcgtgatttgactgacatcttttacaccaattattgccatttttttattgggtactaattattagtattgctttctttattcgttaaataagaagtaaaagaacttttaaaaaataaaataactttttttcctagtacaaagcttattttcaattttttttattgcttaaattttgcaggttaattaaggctgtacttctttttcctacttcctgtttaaatatttggcattttttgagggttttctttctatggatttttgtgggggatcccatctcgttggacacttggttcctggagattgccaaattattgaaaagtttcctcatacccaaacattggcaatagactgaataaataacatctctgacattatttttcaattatatagagaatgctttttgtaaaatactgatttatttaaagatattacaatcatagtagttttttgcaatcttttttaaatcagtggatgtcaaggaacaactattgttctttgtacggcatttttcaacattgtgaagagttcttatactcaaaaagtttgggagacacagtgtgacattgtttaacctgagttgaacttgtcattttgtattcttgtttagagcagggattttattttgtctctttatctaactttgtattcctaactatttctttctttctctttggttctttgtttctttgttcattcttctctctctcccttttttatctatcatataaatatgtaaatatatattatatatccattagggaagaggaagttgtctaaagatatctagtatataggagctttgttctgcagaaaagaggatatgaagtcaattatattggaaattaatgcttaatactttttttaaagcatttatctcccaatgataatgaaaacgatacgtcctatgtaattgagagtgatgaagatttagaaatggagatgcttaaggtatgtttacaattataaaaatattacttcaagttctttccaaaggacatttaattaagtaaaatattaactaattctaaactaggttctaccacaatgaaattgctactaattatgtaacattagatttcacattttccaattcatgtttctttcatgtagtctataaataatgggttagaggtaatttactaattttaaatgtgctttccttgttccttcttattttttattttgaagacagggtctcactctatcacccaggctggagtgcagttgctccatctcggctcactgcaaccttcacctcctgggctcaagtgatcctcctgcataagcctcccgagtagctgggattatgggcgtgcaccaccatgcccggctaatttttatagttttagtagagacagggtctcaccatgttgtccttgctggtctcgaactctttacctcaagtaatccacccgccttggcctcccaaagtgctgggattacaggtgtgagccaccacacctggccttggatttcatgatttgactgacatcttttacacaaattattgccatttttttattgggtaccaattattagtattgttttctttattcgttaaataagaagtaaaataacttttttttaaaaaaagaacttttttcctagtaaaaagcttattttcaatttttttattgcttaaattttgcaggttaattaaggctgtgcttccttttcctactttctgtttaaatgtttggcattttttgagggttttctttctatggatttttgtgggggatcccatcttgttggacacttggttcctggagattgccaaattattgaaaagtttcctcatacccaaacattggcagtagactgaataaataacatctctgacactatttttcaattatatagagaatgctatttgtaaaatactgatttatttaaagatattacagtcagtagttttttgcaatctttttaaaatcagtggatgtcaaaaacagctattgttctttgtacagcatttttcaacattgtgaagagttcttatactcaaaaagtttgggagacacagtttgatattgtttaacctgagttgaacttgtcattttgtattcttgtttagagcagggattttattttgtctctttatctaactttgtattcctatttctttctttctctttggttctttgtttctttgttcattcttctctctctcccttttttatctatcatataaatatgtaaatatatattatatatccattagggaagaggaagctgtctaaagatatctagtatataggagctttgttctgcagaaaagaggatatgaagtcaattatattggaaattaatgcttaatacttttttttaaagcatttatctcccaatgataatgaaaacgatacgtcctatgtaattgagagtgatgaagatttagaaatggagatgcttaaggtatgtttacaattataaaaacattacttcaagttctttccaaaggacatttaattaagtaaaatattaactaattctaaaccaggttccaccacaatgaaattgctactaattatgtaacattagatttcacattttccaattcatgtttcttttatgtagtctatgaataatgggttagaggtaatatactaattttaattgtgctttctttgttccttcttttttttttttttattttgagacagggtctcactctgtcacccaggctggggtgtagtggtgccatcttggctcactgcaaccttcacctccagggctgaagtgattctcctgcatgagcctcctgagtagctgggattacaggcgtgtgccaccatacccggcttatttttgtattttttgtagagatggggtttcaccatgttgcccaggatggtcttaaactcctgggctcaagtgatctactggcctcagcctcccagcgtgctggggattgcaggtgtgagccgccgcatccagccctgtgttccttcttgtgttactttcttgtaattttttcctggaatatgggtagtgatttggctctccagtattgaaattgagtttcctttcttccaattcatgtgtatccatttttatttggaagttttgtttttatacattcaataatcatctttactttctttggtattatttactatggatattttatattatataattttcaaatggattaaatggttcagttttactcttattattgagattgaaaatactagtttataatttatatattttctattcctttacctctaatttctttgtcaggtgttactaaccaaagatgtataataagaaaagccaatgtagctaaattaagtaaaaaatgaagaaaaacacagaagttccccattatgcatttttttattcctaatctttaggttgatgagatttttttatttttatgaaatgagattaatttattgacttttttagttttgaggccaagtaatgagtagtgagtaagaatgtatattctagggccaggcatggtggctcactcatgtaatctcagcactttgggaggccgaggcaggaggatcacttcattccaggagtttgagaccaacctgggcaacatggcaaaaccctctctctccagaaaaatacaagaattggctgggtgtggtggcatgtgcctttagtcccagctacttgggaggctgaggtgggaggatcacctggggagcctggggaggttgaggctgcagttagccatgaccatgccactgcactctagcctgggtgacagagtgagaccctgtctcaattaaaaaattaaaaaaaaaaaagtagattgtgaattcagatgtaggtttgtatcccagcttttccagttagtatctgtgtgactttggggaagtttcttagcatctttgatactcggttaacagttgtaattattatttaaggtattgcttgagaagagcttagtatagagcctgacatttagtaagtgtttaatacatattagctaacagtaaaactagaacataaatactgaattgtattttgttattaattatccatttctctgagaagtactgttccaatagtacatttataggaaacttgtggacgtctacaaacgtatacattaaatctcttagaaggcaacctggatgcccatattagagaactctattttaaacatgcattctaagtatgtttgtggacttgaataaaataaaacaaacagaaacacttctttcttctgccttcaggcttgaaatgaacatacttttttttaaaaaaaaaccttcaaaatgaaaatattaaataaaagatttaataaaaagagaaagtaaaaactgtagtttaataaagtcttcctgtctcttcatagttaaaaaatgttatagatgaaacaattttgaaatattcttgaaatagataatctttatttaggggagaatgtcagatactgtcaagccaaaataaaaacaaataactttatttcatgtttgtaaaattccttttctaaaatgatttgaatcttttgttgttttgacaattccaaaacacatttattgtttgctcatagtttcagccttattcagaaagaatgcgactgacacatgatatagagaaacttgttccaaaaataacattaaaatccacgtttactacttgagaatcgaaaatattgaggtgcaataaagaataaaatgttttaaattatccaaatttaaaatttatgatagctttccccaggggcagtttattatatgctattaatgagccttgtttatgctggaaatgttccatctttggccttgcgccttagaaaccattcatgagcacatatttaaaccggagcacacatgttcttttgtagtatggcttgcacatctgccagctttcgacaaaattgtaggccctgttaataatagtccttttgtgtttggtgaaaaagatacgacactgtcagtggttttgcttttaagatttcttttaaactttcagtctttagaaaacctcaatagtggcacggtagaaccaactcattctaaatgcttaaaaatggaaagaaatctgggtcttcctactaaagaagaagaagaagatgatgaaaatgaagctaatgaaggggaagaagatgatgataagggtaagcactgaagtatgtttgaaatgactcacctgtgatacctaccactgactttaacttaggatccagttttggatggtttggaggtcagggactttgtggcatatagttaattattggatccttataagcttttgtctccttagtgcttttgtctccataaagcacaatcttactacttagaaaaatagagtaatagcattatgatgataaaaatatctttccctttgtttttttgtatttctccaaatcattatagctctcatttagaattattaaagctgagaactctaacaatgaacttttattgtttagtggttaattatcttgattctttgttttgccctttcttggccactcaggaatctttcaagctcactgtggacagggaaagtgacttgggtagagctaacataacttcattgtgctgtgcagttagaattttgaccaaagatgtgggtaactaacttttcctaactaaatgacatttaggtaactaaactaaacgagattttcgtaactaaattttggtgtaactacatttagctttaggtaactaaaacgaagattttattttatctgtggatttttttagtgcgggactaatgtaatttctgattaccattaattgaaggttggttatattataacatttggattggtatattgcttgccatggtttgttctaaatgttagcctttagaagtattcctgattctaaaacatcagttttttttaatagtcctggcaaagtgtgaatcacaacaaaattctaatacttaaaagtaatccaagtgtcacagatggtacccagaagaccagtttgtattggaattaaaaaatagaaaacattaacccatggtagctgtcactgtattctttcaaagaagccaatgaaataaactgttttctccctctatgtggtgtttttctacttgaacataaatgcacattttattttatttccagactttttgtggccagcacccaatgaagagcaagttacttgcctcaagatgtactttggccattccagttttaaaccgtgagtataatctcatttaatcaaatcacatatttagtattctctttaaaacaagggaaaaggcaaataacctgtctgcttaacagcaacagcacaacttcactatagttatacatgccacactgtattttctgtgtgactacaaaattatttcaaagtgatatttatataaaattcatttctgcaaattgtttttataagtgaggaaaaatggttttcctttaactgagcagttctgagtagaaactagtttaaagatacttataaataaatgttaatttaatactgacttgtttttcattaaacgagtgtctatgtgcctgttttgtgtatattacccagaacatgcagatgtactagaagttcttaatacaacaatttgaggaatagtgataatcttatctattttaatgtactcaaaatttgtttacatctaacaggcacatttttgtgaggattaaatgagatgaataagaatgagatgaacaagtaaatgtgaataaaactaataagcctgtgaaaatctagactggatttttcctattctgagaatttaaaatataatccactgaagtatttctttccttttttcttttgatcttaaacattttttatttatgtcttacatacagaaaagtgcacatgttgtagagatcaatgaattgtcataaactgggcaccctgtggccagcacttagttaagaataggtcagtaacagcatgccagaagaccacctctccaattgatttttcccatgatattttattaagaaaattttctaagatgtagtaaagttgaaagaacttttttctgtgcatgtctgtattcccaccacctaaattcaactatcattactatacttgctttatcacatatccatccattcatatgtctctatccatccattcattcattccagttttaaaatgcatctcagggtcaatcgaggacaccattacacttccacctaagtatttcagcatgtaaattattaacgagttaaatatttacttaacagttttttctttggtgtaaaatttgcacgtaaggaaatataaaactttaagtgtacatttgcaaattttaaatatacatgtgcatacccatgtaacccaaattcttatcaagagatattattatcatcaccacacagagttcccttatttcccttttcagtcagtccttgtccctgagcatttctcttattattttaaagtattgattcttttggatatctagtatgaagcttagaatctgttttttactttagatgtatgtagtgaaatttaatatatataccaaatggtagttgttagttagcttgaatgggacattggtcaaatggcattgtttgttttaaagttccaggtttgtgcatttatgtatgaagtttgaaaataaattctatgagaggaaatgaaaaattgaatggattttaatttgtaccttgggtttcttattaataaaacaaaatagctttttgcttttcaccttcaagagttcagtggaaagtgattcattcagtattagaagaaagaagagataatgttgctgtcatggcaactggtaagttgtacttaagcaaaacctaatcctttaaaaaaataaaacataaagagtttgaaatgcttaatctttcattaaactctcaaaatacaaatgcaactacaaatgatgtaaactatagaagagagtgaacaaagaacagatgctcagatttatgtatcaattagcttttaggaagatagcatactagtattgaccattcatctgtataagtacattgtaaaaagaaatgaaagcatcaaaggtttatttttatttctatatttttttcattttatttttatatttttttcatttcaaggatatggaaagagtttgtgcttccagtatccacctgtttatgtaggcaagattggccttgttatctctccccttatttctctgatggaagaccaagtgctacagcttaagtaagtcatgttatcattgccacaatatcaccctctttttttcttctgtgggtgaaacatctgatccatcatgcatgttaaaatctagttcacaataacacatttctgcaggtattgctttatctttattggtaataaatgaccctttagtggaagagcttaccttctttcttgtgttctctgtaattcaaagctaccaggtggccctgataaaatttttttaaaaaacattattactttatgctggtttacattgaatatctcaaaattcttttctctttttgttacccttgctttttagcttgataagaagtgtatacatggaagtatattttttatctatgaaacacttttcagcttcttcaacctgagcttgcaatctgttttaaattgatacataatatctttacatattcatggggtactgtagtattttgatacactcatatcaaatacacttgatcaaatcagggcatttgttcatcaacttgaacatttatcatttctttgtgctgggaacatttctaatcttttctttgagttattttgaaatacacagtgttgttgttaactatagttaccctactgttggttaatgagtacaaacatacagttagaaggaataggttctagcaacctattcctttaccccctgtcatcccctgctgccctgagcttgcagtctctttcaaagacccaccttaaaaacttgcattctgataaggcccttgaaggaatttgcttatcaagttagtaagtgacaaaaaagaaaattgcaaagaacaggaatataaattattatatttctttattctttctcacttaagagtgaaattgatatgtgtaatgtgtacatggtgccagaatatttgtttttcttcttatagaatgtccaacatcccagcttgcttccttggatcagcacagtcagaaaatgttctaacagatattaaattgtgagtaatttttttccctcaacttttattttggatttatgggggtgcatatgcaagtttgttacgtgggtgaattacatgttgctgaggaagttgtgagtaatttatgtcatttctaatcatgtggtcagatgtctgtggtatatgagagaattttgtatacaaacaaattttactaaatgcatgaaaaaaaaagtccatgattttaaaatgcactttcttttgtacctttgcaggactgttactttttaaatccttcaaacttgaagaaatctgttattctcggttcttgggctataagattagcattgtactcatagaattataaaaattttggttttggaagagaagttggagaatataaagatttgtctcattttatagatgagaaaactgaggctcagagacaagtaatttgcccaaaatcacacaatgactggctgagcagggactggattctaggtctcttgcccaaccaattctatcatgatgtaattcctaaggagaatgtcatctcagatacacatacacacacccattttgtgtgtgtgtgtgtgtgtgtatatgtacacacacacacaaacatatgtacacttatatatacatacacacacatatattaatatatatgcatatatatgcatgttctaattcagaacattttcatcactcccaaaagaacacccctgcccattaagcagttgctttctttacgtatatattagtatatacatacacacgagatacacatatatttactgagttttgataaatgcatacaaagatgtaaaccaaacctctaacaagatacagaatatcactgacactctagaaagtttcttcatgtccctccccagtctgtccttccatcctccatcctaggcaagccactgctccgattttctctaccatagtttggtagaatgccatataaatgcagtcacacaatattaactcttttgtgtaagacttctttcatttgctgtaatgtttctgagattctttcatgctgttgcatgtatcagtagttttttgttttgttttgttttgtttttgttttttcagagtcagggtctccttctgtcacccaggctagagtacagtggcgcaatcatagcttactgcagcctctaactactgggctcaagctatcctcctgcctctcaagtaggctaggctgcaggtatgttccaccatgcctggctaattattaaattttttgtagagacaggatcttgcttggttgcccaggctggtcttgaactcctggcgtcaggattgtttccagttttggattattacaaataaagctgagacacatataagtctttgtatggacatatggtttcattttattgatacatgtcaaggagtgggatgactggatcgtgtggtggatatatgtttaactttcttttttctgagataaaattagaaggcgatcctcctgccttggctttccaaagtgccgggattacaggcgtgaaccaccgcacctgatgcagttgttgttgttgttgttgttttaatatctgattattattttattgtatttcattgaatatagcacagtttgtttttacattttcttattgatagacacctaggctatttttctggttttggactgttactaataaagctgctatacacatccttataaaaatcttttttgtgaacatgttttctttttttctaagcattttaaatcacctttattgaggtgtaattgacttacaataaattttatatgctgagaatgtataatttgataagttttgacacaggtatgcactcatgaaaccatcatcacaatccagataatgaacatattcatcacccacaaagtttacctttttgttttaaccccagtcaccgggtaactgctgagctccttcctgttactgtagactagtttgcattttctaaacttatatacatggagtcattcatattttatgtgctcttttttgtctgatttaaataatgcagtataattattttgagattcattcatgttattacagtgattaatagttcattcctcttattgttaagtggattacattttatggatatccaacaagttgtttatccattcacctgatagacatttggatcgtttccagttttgggttattacaaataaaactgctatgaacattcgtatgtaagtctttgtatggacatatgttttcattttattatatatgacggagcggaatgactggaacatgtgatgcatatatgtttaactttcttttttctaattgagataaaattcacagaacataacttttaccattttaatcattactaaagtccagtgggttttggtatagtaataatatataaccatcataattaattccagaacattttcctaactcccaaaagaaattccatacccattaaggagtcattccctattttcccttttcttttctttctttttttttttttttgagtcagggtctccctctgtctcccgggctggagtgcacttgcatgatcttggttcactgcatccttgatttcctgggctcaattgatcctcccacctcagtctcctgagtagctgggactgtaggcatatgttaccatacctggctaatttgttttattttgagtggagatgagattttgctatgttgcccaggttgctctcaaactcctgggctcaagtaattgtcccacctcagccttccaaaatgctgggattacaggcgtgagccactctgcccggcctattatctctgttctgcccacttccaaccactaatctactttctgtctctatgatttgcctattctggatgtttctataaattaacttatacattatatggccttttgtgtctggcatcttccacttagcatagtgatatcagtacttcattcggtctttttttatgactgaataatattccatagtatgggcatacacattttaaaaattcattcatcagtgatggacatttgggttgtttcctttttggctgttatgaataatgatgctgtgaacatttgtgtaccaatttttttatgaacatacattttcaacgcttttgcatatatgcctaagagtggaattgctgggctatatgctaattttttaagaaactatgaagcttttgagagtgattgtatcatgggatattcccaccagcagtgtatgagaggtccagttcctccccatccttgctatcacttagtctggctgatctttaacttaagccattctaatagtatctcattgtatttttagtttgcttttccctaatgactaattatattgagcatttttcatacacttattggccatctgtatatcttctttgagggagtatctgttcaaatcttttgcctattttttcttagtgagttttgatagtcatttctatattctgaatataaattatttatttgatatatgctttgcaaacattttctcctagtttatggcttttcatactttccacacagttcttttgaagagcagcagtttttcattttgataaagtccagtttgtcgattcgttcttttagggattttgcttttagtgttttgacccaaggtcacaaagatttgcttttatgttttctcctaaaagttttatagttttaagttttacatttagatttacgattcatttttagtaaatgttgtctattgtatgaggtattgattacagtttatgtatttttcacatattgttccagctccattttttaaaaagactatgcttttacactgaattgactttgtacctttgtcaaaaataaattgactacatatatgtgggtctattgctgcactctctattctgtgttctgtggatctatttgtctgtcttgattggtgtcttgattactgtagctttataataaacctggaaatcaggtagcgcaaggcctcttgctttgctcttttctttcaaagttgttctggctattctatgtcctttgtatttctgtgagcatgtcagcatcaccttttcaacccatatgcctgctgggattttgaatgagtttaccttgaatctagatatcgaaacaattagctgtcttgatagttattgtcaccgttttataccgaagaaactaggcatactaaagtaacttggctaacatcacttaccttgtaagaagtagaactgggctgtttgacatcagagcttattctttataccatttcctatgttaattagaatacaatattaatttcataaaggtaaaggcatatctgttttgttcctatttgattccttgtgaaagcacaatgcctagcgcacaatagacacttaaacttatctgttgaatggacaggtgaatgcttttaaagtctttccatatagaaaattaagtttcattacatttgacttgatctaggttttcatttcatagaatggagagcagactctgtaaatattttgccccagacctagctttattacaaacattgtcttaattaggattctgtctacccagaatagaaattaactcaagctagcatgagtgtatattgaaatttatattaaggataaaggaatgtctcatagatcccactcaaaagaaattagccagcccttaggaagagactggaattgggtttggaaaatacaataggtctttctttttatctgtagtctttagtgagtcttcctcatttttctctctgaagagataagcattctctgcatatatatagcattcttttagattttcgtgacataaagtattatttaaactttcataaggtatcttgattttaagttgtaattccttgagatgattgttttctttattgttaatatgtttcccttcctgtttttttttttttcttttttcttttgtttgtttttacagaggtaaataccggattgtatacgtaactccagaatactgttcaggtaacatgggcctgctccagcaacttgaggctgatattggtaagtgataaagaaagatctctgtaaatacttactgagttaatatttaaagttaaacctatggatggacactggatttcacttctgttaaagtttatttcaaacattacttcctccaggaaatctctgactctctaacttgctgtttcacctatcttatcccatgatactctataattccttttgctatagaaattaggctctgttatcataattacctgtttatatatctgttttcttctgctaggctataaacttttcaagggaaaaatatcactttttaaaatttatgtttccccagtgcagtgcttggcatataggcacttaaacatattgttgaatgaatgttgaatcctaggttctgtgaaattttaatttacttgtttttcatgttctgtatctaaattaagtcagtgtagtggttttgtaccctctttgttcataagaatcacttttcaaactttaaaaaaaatgtaggtaaccaacacccaactctgaaaattctgatttaacaggcctgggttggcacctggcattggtggtttctcacaggtgattctgatatatagcccgggttggaaaccacagtacctttgattagttgccactagtgagtatgatttattacaaaaaccaaaaacttagataagtcacagtttatttcctagaacgtgtaaatatagaattagtcaaaagctgatagcactttttttgtacttaaaaatattttaagcctcagtatagtgagacctcatctctacaaataattttttaaaaaattggccgagcctggtggtgcatgcccatagtccaagctacttgggaggctgaggtaggaggattgtttgagcctgggagatgaaggctgcggtgagccaagatcatgctactgcactccatcctgggcaacagagcgagaccatgcctcaaaaaaaatttttttttcttcttggtggttaggcttaactatccaagaattgcaatcatggcttctattgcaaatgcccctatttcccaccttcagttggcctaaccaaatttaatttttcaatatcatatgatctttttgtataattatgtattcaaataattccagataggttaggttttcgaattgcaacgtctcatttaatggttactttcatataactgtaggaaagcatttgataatttttccaacaatgtaatgaaaacaaacttgtatcttttttattatgtgttaaaaccaacaaaagaatgagggcagcaattaacatttcattaaatatattagcaatgagtacatttatgagctcttaaactcccttattgacatactgtattttttgcctttaatggacaatgaatttgatatgtttcctaataggttgtatgaagttattgtgaatatttcactttggattaagaataactaccctatatataaatttcatggttgtattgcaaaagctggggtctatgtccatagtggtttgggtacgtttttactatttgctttgtttctgtgatagtgttaaatgaataataagcttaagtatttaagcaaatacttaatacttctgacaagtagttagaactctctatttttgtttttttgtaatggatgagttatggacactgcaattattagagcagcgtactttgcttatgatggatgaaaatgttctctggttgactcagtgttgaataaaaagggatacatgaaataaaaattatttttgaaatattttcctttgccttttgttgcgggaaattgtacaatgcttgcaaaaatgaatatacgcaggatattatttgtacagcagtctgacatttagctaatcagattcctcatttttaggtaaatgttaaattacttaagtagtctggatttttaacagaaacagcaaacatagttttatagggaggctccttaccaaccagacttttaacttaagtgaatgttggcaaaagcttgtctaaactgatttccagggataaggtttagctccattaaaagctagtttgtcaaacctgtaactaaagctttttaaaaaatgaaagttttaaaagagaccatcattctgttttaacctatttaatttaaaatctgggctgaagtaggagtattgcttgaacccaggagttcgagaccagcctgggcaacacagtgagaccccatctctgaaaaaaaaaaatgagctgagcatggtacctgttacagtgctagttatgaaagaaagaaagagagagagagagaaggaaggaagggagaaaggaaggaaggggctgggagtggtggctcacacctgtaatcccagcactttgggaggccgaggcgggtggatcatgaggtcaggagatcgagaccatcctggcgaacatggtgaaaccctgtctctactaaaaatacaaaaagaaaaaattagccgggcatggtggtgggtgcctgtagtcccagctactggggagggtaaggcaggagaatggcatgaacccgggaggcagagcttgcagtgagccgagattgcgccactgcactttagcctaagaaaaggaaggaaggaaggaaggaaggaaggaaggaaaaatcagtcactcactcaggtttagtttcaaaagccaaaacagtgataatattgaattttttccagccactcagtagtacccagagaattttgatacaaataactgactttgaccccatgtttagtaggttttttttttgtttgtttgtttgttttttttttttgtctttcttctccacactctcttaggactgttgtagcttgtaatgttagtgaattgtaattgtttatttgcatgtctgtctcctcttttagaattgtgaactcctcaggtcatggattgtattttattagtctttttattcctagaaaagtgtttggataataatagatatttattaaccataataggagtagtagcatttttgtgtgtgtgtgccaggccctattttagcattttatgtgaatgatataatttaatttttagagcatctagaaaatgttaggtaccattattatccacattttacttgtgagaggactgagacttggaaagcttaagtaacttgcttaaggtaatacacatggcagatggtggagccaggttctgcatctgggcagtctgactttagagctttttaatcatcctcctcctagtgtccgaacattattaatgctcagagaagtatcaaagaatgatgatactcattgagggaaaaaattattcttaagtatcaatttgttaattgaggacaaaagcactactgttactactgtgaaaaatctgaaaacattgtcacggatgattttacaataacatccttttctgacatgcattacaacacactattgattccgtttcaatgtttgtgtctggtatgggggcggagtagagaggctactacaggaagaaagaacaaataacatttcttcttactactttgtgcatcatgtgatttagctcctcccataccattttacattagaaaatgtggctgtcctcctgtgctctagtactggcatttcagaggactctttgcaatatgatatgtgatcaatcatggatggcgatgcagttaatttcagtagaaatttgctgactctttttatctcttttaatagctaatgcatgagataaaattgaaggtattaccaaggagaaatgcaggtggatagttttggaggcaaagtcacagtaagcaattcatctctccaaggaatagtgatgaaagctgagatccaataaatgtcttgtttggattaatacataaatatttccttttaaaattcttaaggcttttattcatatatctcccctctccctatttccaataatgatttttggtgttaatatgatgatatttatgcttctgtttttataggaaccaaatactttgatttggttatttattctcctttggagatgtagatgagtttattttttcctttcgagctttatcttttcctttatgtgtttttctttttttacaggtatcacgctcattgctgtggatgaggctcactgtatttctgagtgggggcatgattttagggattcattcaggaagttgggctccctaaagacagcactgccaatggtaagctttgccaagtctgatgtcccgaaattacattcttaataaggagagcattcaggattggggagtggtaaagaagctgaagacttcactataaaagagcaaatggataatgtaaaaagagaactatttttttaaaaatgctaaagttggtatataatctattgaggaatataatagaacaaggcttgacaaaccttttctgaaaggaccagataataaatatttcaagctttataggccacatgtagtctgtatcacatattcctctctctgttttttcttttagtaaccctttaaaaatataaagagttacatttttcactggtgggccataacaaaacaggctgtgggccatatttgtccgaatgtcttctcagtgatctttcatccgtatgtccttttactctaggatgctgtgaaatcctggttaccccttcttgtatcacattgaaaacctaaagtttgaactattctatagaaattttattaaagcttttggtattagaatttccctttcttccctaattataaaaaatagcaaattttggccgggcatggtggctcacgcctgtagtcccagcactttgggaggccgaggtgggtggatcacctgaggtcaggagttcgagaccagcctggtcaacatggtgaaaccctgtctctactaaaaatacaacaattagctgggcgtggtggcaggtgcctgtaatcccagctacttgggaggctgaggcaggggaattgcttgaactcgggaggtggaggttgcagtgagccgagattgtgccattccactccagcctgggcaacaagagcgaaactctgtctcaaaaaaaaaaaaaaaaaaaaaaaaagtgaatttttacatgaatattctacatgattggcatatttacatgaatggtttaaaaacccacaataatagcactgttttattttttattttgaaaattgtagattcacaagaagttgtaaaaaaaaaaatacctatatagaggtcctatgtacctttcatccagtttcctgaacagtaacatcttgtgtgactatagtacaatatcaaaactaggaatatgacatttgtacagtatctagagtttattcctatttctctagttttgtaagtactcttttgtatggcatgtgtattgttctatacagtttaatctcatgtacatttgtgtaactaccactgcagtcaggatgccaaatgttcccttaccacaaagctccctggagctgttcttcccacccctggccctagccactggcaaccacaaatctggtctctatctctaaaatattatttcaagaatgttatatacatggaatcatgcaatttgtcaccttttggaattagtttttttcactcaacataactaccttgagatctatccaagttgtttgtggtcatgtgttgcctaacaacagggatatgttctgagaaatgtgttcttaggacattttgtggttgtctgaacatggacttacacaaacctacatgataaagcttactgcacacctaggctatatgatagagcctattgctcctaggctgtaaacctgtacagatgttactgtaatgaatattgcaggcaattgtaatacaatggtaagtatttgtgtatctaaacttatctaatgtagaaaagacacagtaaaaatacagtataaaagataaaagatggtatacctgtatagggtgcttcctgtgaatggagcttgtaggactggaagttgctctgagtgagtgagggagtggcgagtgaatgtaaaggcctaggacattactgtacactactgtagactttatacatattgtacacttaggcgacactaaatttttaaaattttctttaaaaattttctttcttcaataataaattaatctcagtttactgtaactttaattcataaacctaaaacattttttgactttggactcttgtaataattcttagattaaaacatgaacacattgtacagctgtacaaaaattttttcttccttgattaatgcattccataaggctttattttaaaattttattatttttatttttaaaacttttttgttaaaaactaaaatacacacatatcagactagacctacacagggtcaggatcatcaatgttgctgtcttccacctccacgtcttatcccactggaagttctttaggggcagtaacactcatggagctgtcatctgtgataacaatgccttctcctagatacctcctgaaggacctgcctgaggctgtttttcagttaactttaaaaaatgaatacgtaggaggagtatactctaaaataatggaaaagggtataggtaaatacgtaaaccagtaacatacttgtttattattcatcaagttatatactgtatataattgtatgtgctatactttttaatgcctggtagtgcagtaggtttattgacagcagcatcaccacaaacgtgagcagtgccttgtgctaagacattatgctggctatgacatcacttggtgataggaatttttcagctccattataatcttatgggaccactgttccacatgtgctctgtcattgacagaaatgccgttaagtaccacatgactatttttcggtggtctgttcctttttattattacagagtattccacagtatggttgtaccacagtttaactgatcacctgttgaagaacttttgggttgttttccagtttttgactattatgaataaagatgctatgaacatttgttcatatctcaaaggttctttatttttttttatttatttttctttttttgagacagtctggttctgtcaccctggctggaatgcagtggcgcgatctcggctcgctgcaagctccgcctcctgggttcacgccattctcctgcctcagcctcccgagtagctgagactacaggcgcccgccactgtgcccggctaattttttgtatttttagtagaggcagcgtttcaccgtgttagccaggatggtctcgatctcctgacctcgtgatccacctgcctcggcctcccaaagtgctgggattacaggcgtgagccactgcgcccggccttcagagattctttaatgggtgaatggttaaacaacctgaaaatataaaagttttcatttctctgggataaatgtccaggagtgtatttttagtttttaaggaattgtcacaaacctgttttccaaagtggctgtagcattctacattcctgtcagcagtgtgtgaatgatctagttatccttgccaccgtttgttgttgcaactgttttttattttagccatttcgataggtgtcgagtggtatctcacttttaatttgcatttctctcatggctaatgatggtgaacgtcttttcatatactaatttgcctctggtgaaatttcttacataattggagtgcttgtttttttctgttgagttttaagagtttaaaaaatacattgtagatatgagtccttggtcagatacgtggtttcaaatatttctttcactttgtagcttgccttttcattctttttaccgtgtctttcacagagtaaatatttaacattttagtgaaatccagtttatcattttttcttttatggattgtgctcttcacctagccctagatcctgaagattttctcctgtggttctttcctaaaattgttacagttttatgttttaagtctgtgatccattttgagttaaattttgtataaggtgtgaggtttaagtcaaggttcattgttttcccaatagattaaattgcagcagatcctttgttgaataggctgtccttcccctgttaaattgcgtttgcccctttgttgaaagtcatgtgggtgtatttgtgtgggtctatttctgggttctctagcctgttatattaattttgaacgaataaagttggcttatgtttaagttttcttggtagtagcgaggcaatggtgccttctgagcccaggatttcacaattttgtgagtaaactgtgttagaaattgtttgttattcttttggtaggttgtctagttcaatttcattgctcattaatcttgcttatagatagcaaattgagaggcatctcaaaaatagtatcttttgttagcttatctcacagagtttggttggagcagatattaaaacaacaaaccaaaaataaattaaatatactagttagcaagtttatattgagggaaaatcaaaccatgtgaattgagctccaatgatgtggctggccttgggtcagattttagtatcatggttcaacaaggtagctattaaaatcttcatactttttcttgaaataattctttagtagtcacataggacagcacacactcatggatttcttctttccttactgtctctttattctcagcctcctgttccttctcatctccctgaccttttaatgttggccttccagaaactttagtctttggacctacctttgcactcattttcttggtcatttcacccaacatacagttttatgttattttattttttttatttttgagatggagtttcactcttgttgcccaggctggagtgcaatggcgtgaactcaccttactgcaacctctgcctcccgggttcaagtgattcttctgctcagcctccccagtagttaggattataggtacgtgccaccatgcctagctaattttgtatttttagtagagatggggtttcaccatattggccaggctggtctcgaactcctgacctcaggtgatccacctgccttggcttgccaaagtgctgagattacagatgtgagccaccacgtccagcctacagttttaaatatcaagtctatactgaggactcccaaatttttatctccatcatagactgatatcagcagtatatgagtgattcagttgtttttgcctctttgccagcatttggtgttgtcactattagttcattttagccatttaatagaatatatgtacatatatatgtgtgtatacacaggcacacatctatataactactcaacatgcctctggtgagatgaccaacaggtatctcaaacttaacctcttcctaattgacttctgcatagcactccagatctgctctttcctcactctcctccatcttgtttaacagcagctccattggccaaaattttggaattttcctcaatcttttctctttttcttacactccactgtttatttaaacagtaaggaaatctcgtgaggtcttcagaatatatgcagaattaaatcacttctctcttgatccctgccattccccaggtacgggccaccatctccttagggcctcctgctttcactcttcccatccctcattctgtttcaacacagcgtccagagtgatactttaaaaatgaagtctgatagatcatgtcttcggctcagaaccatctagtagcatgccatttcattctaaataaaggcaaaagtccttatgatgagttaccgatcctcatgtaatctggccttccattttccctctgatctcattctctactggtctcctcattcaccggatgcagccacaccaccctccttgtttttcttcggacattccaggcatgcttcagtgcctgggctttgcgcctgctgcttcctctccctgaatacgtttcccccacattgtctataggatgttctcccatacttctctcagatctcttggatttaggcctcctgggccaccatatttgaaatatcagattagttccccctcccccatcattcagcattcctcgtaaatctttgctgttttaaaaatagcactatcactgtctaacttactgtgttatattttgttaattttctgtgagttcttcttcactagaatattctttgtagggaggagtttttgattgtttggtttataaaatctggaacaatacctggcttataggaggtgctcaatttataatggggtgaatgaatgaatgaatgatgatgagaaagctgagaatcagtaaagtgactttccaaaacaggtagtgggcagtatagagttgggccataaatagctgcaccatacaacatcctgctagtttctaaagcaaatgatttgaaagaggcataaaacataatttctgccctcaggtagctcatagttcagtaaaggagtttagattcatacctataacagtagaagtaatagcaccaaatgaaatatggtattatgaagtggtacaaataatataaaaagatgaacagtgttagtagtacatgtttagaagggatttctgtggtgaaagtcactaggcacagtgcacctggaggaccgatttccattaatttagaatggtttaaagtaagcttttggaaactaggaagattactttctgtaatcctttcctaggcctttgattctagaaggattgtgttaaaggagttttaaatattttatacagttcttaaacattgttaagcttgaattaaatcttttattatgtctggccatggacgtcattggatcattttcatttcttgggaggattaataaagcacattccttctgttgggcctccagtgcggggagggtgttggccgagcagtggctgagaaaacgtttttcccctggtgttttcaagaaccctctttattagctaagtggtgagacatgccacctggtggttatagtagtatcatttttctcactgttcttggtgcttttcttctcgttctgattccagttatactaggacaactgctataaacctggaatgtttcacactatattatttcagtaatttcaaaaacagcagaaatcactaagctgtttggcacaaagattcctatttggaaggaatcagacaaagtgagtgttgagaaagaacagccaggcagaaagctttgcatcagtcttaaagttctttacatttcaagtaagaggaattgtgaaatccataagacatgtggggtttttctattactttctccccagtatctattacaaagatcagcacatagtaggtactcagtaactatttagaatgagtgcatgaatgaatgaagtatgtgtgatgttatggagtacaaagttagaattagcaacatgacctgaatttagaagcaggtgggatacttatacttttctcagtctgtgggcaccacaccattgaagtatatgtctaagattaatttatatttggttgtttgatttagcaaaacttgctgcctgttaaaaaagaaattaagacctgtcaacttaaagaatacattttgtgagttaagaactaaatgacagtataatttattacccaaagcagtttgcttctgaaaattaaagagttcaagctattaataattatgctgtgactgcaggcataaactgggaatgtcctggcaaatgaggatgtattgtcacctttctcagcctgcctgtgtgttgtttttaagcttcactctagtttatatattttaaatgtcataaaataccacatacttataagagaaaaggttctattcattgctgaagtggaagcttatcattaatttttatttatttatttttttttccagttttggaattcttattactttgaacccaagaaccactgataactagcacaatccagtgaaacagaggaagcagcagcttaatcaaaggaaaaatacatttaagattataagtctggttataagcttaaaaagtgacccagaaagggatatcattgctaaaaaaaaaaatccccttgtgacctgggtacattttgcaaagccacaggtttgcagtgttacacaagggccaaaggaggccatgagttgtctttggttgtggggccggagggtaactgttcatgaaaatagtgagtgtctgaagattaagaaaatcatgctgcagcagaggagaagggagaggaaggcaggaagggaaaggagatgcctgagggtcaaaagctgagcccaagcctaagcccaagctcaagttcaagccccagcatggcacaattttgtgaattaactcaggctgagttgcctccagtctttggaatgtcatcttatactggtactgctgaggcagagggcagtaattggttctttgggataggagaaggggcagttgctgaaatacaaaattaatagtcagcatcccaagttcctcaattgcagccaaaatacatgtgttcaggcctttcggcagtaccgcccccagaactaccagctgtagtgtggtctattcccagacagcaacatgcaagaataagtttacaatacactcagcccttgtggcttaagatcaggggctcagaggctgtgacaactcatgatgctgaaaatgtatccaatgaaaacgaagtactagcttgtttagtagtaacgaagtactattaatttttaatatagtctgatactttattttctaattgtagaagcaacattcttagctatatctttctagaatgttgaggcaaaagagtaaatttatagtgattttcactgttaccagattgctggaatagggaatttctggtagcaagatgggaatttttaagttggaagggtctaacacatcatatagccgtctccatctcattttttttgctgaaaaaactgagcccttgcaaatgtcagttgcaaatctgggagtagtactcatgtctctgaagttgttatatagaattctttttatttattttaataacaatatttatgatagttgaaactttttgagtgcttactatattttatttcatgcattatgttcagcactttacatgttttatctcacttgatattcacaactttatgagattggcactgttattgtagccattttatagatgaggaaactgaagcttagagagttaaataaagagctcaaaatctcacatctagtaagtggcaaaaacaggatttcagctcaagcaatctgattccaaaacagacttttttcactgtgctgccattcttttgcctggtttttctgttaacttcttaaatatatgtcatgtttcatgcttacttcctcattttcataaatatattacctgctcacttatacattatattgcttagaaacaaacccaaccctgttttcttatggactgtatcctgaaaatcactgtttttaatatgtggttaaacaagtgttttattagtgcatttatataaattatttaaccaaaacacttaaccggtgaaagtgctttactgtgtgagaatgtgcatgttctaagaacctctaatttttaaacctcccttattctcagccttatatttgttaaaacctgtgtgttaacacagatgcacccatgttaggggttaattagagaaaccaacctctttatagattagcttgttcatctttaagttgctaggcaggcactgtaaattcagagaacaatctgattgtaagccacaaatcaatgaaattaattttggggttgccttttaaaatagtgtcacaaaatttaaggataaagaatgcaaaaatgatgccaattatctcatcacattagttttgatttaatttttttaatttgaaaaaacctactcttaaacttaattgatttttttaaatataagtttggagataatttttaattcagtaaagttatagtgattgaaaaagtagtttataatttttaataaattgatcttgttttaattttgagtcatattctagaagtgcttctttgcaaattggtaaattgcacatacatttccacttatatacaagataattgctatggttggtttgtataatagatgcagtgcatctgaagagctattttatgagaatattgtttcttgtatctgtcacgagccaaaaagaatatttttaagaaagttatattcttggtgatagaacagctgataatttagaaacaactgtaagacagtccactttttctgattatgaaataataccatagttaagtgtaatttcctataatagaataaaaacacgagttctagttttaggggaggcatgttgttaccgtaccttagaatttctggaagatgacatattcatgcttttcctgataactgctgagtctcctgctctgtctgccaatccagtcaagaagcctttgctagcaatcaattaataatacgtttcatttatacatatttcctatatatagtatgttattgattatctcagtaccactgaagagaggttatctgggtcattggagctttgcttctagatttgtgaagccataaacctatatatttaaaataggaggccaaaaaaaaacgaccattgctttatatagttagattttcagtgaattgagagtttatcatttgtaattatacattaatcaaatataaggcataatatacccccctgcttatatcagcaccatttcaaatgtaatgttaaaaaataataaatggagaagtagatagctaacaagtaggcttaatttaataagacaaagtaaatggcatttggaaacctcatggatttaatgttttatttaaatgatttctgatttttaaaaagtaaatattgtttccagaaggctgagaaacaagttagtagggagattttttctttgcaaaaaaattttacagttgtgtctttaacattgtaccacaaactgttgtcctaccagtctctttgtaagaaagctatagacatgttgggaatgaatgagctctttcctttttaaaatatcagttttacatcattcaggttccaatcgttgcacttactgctactgcaagttcttcaatccgggaagacattgtacgttgcttaaatctgagaaatcctcagatcacctgtactggttttgatcgaccaaacctgtatttagaagttaggcgaaaaacagggaatatccttcaggatctgcagccatttcttgtcaaaacaaggtaaggatttaatggttgatgaattttggtaatgatttcctttttttttttttaacaacttatgtattttatgttatttacgatttccttctaatgcatatttaacatatttcaaattccacctagttttggttcaagtcaagcatgatgttatataatcaattcagtgattgagactagtgtatttttaaaagcagaaaccaattctcctaatattttaataccccattctgttgcttaaacagggcatatactatttatttttattttttaaaattttacttatttatttatagagacagggtctctctgtcgtccaggctggagtgcagtggtgtgatcacaactcactgcagcctcaaactcctgggttcaagcagtcctcctgcctcagtctcccaagtagctggaactacagtcttgcaccaccatgcctggctaggacatatacttttaatgattgataagtaaacaagcaaacataaaatgactctttcatctgaattctgtctagtttactaattacatgacttcagtcttaaggagcttagaaaaggtcaccttacaaacacagtggagcctgtattgtgttccaaggactattgtaggcgctttctatataaaatgatctaatttaatccctataactgctcagtaagttacgtattattttcattttattgttgaggaaactggcattagtacttttttctgtttattttgtttaaaggcattttaaatatatatgttaagaagttttcaaaagcctatattttactttttataagcctttattttactatttgagacagtgtcttgctctgtcacccaggctggagtgcagtggcgcaatcccggctcactacaacttccacctcctgggttcaagctattctcctgcctcagtctcccaagtagctgaaattacaggtgtgcgccaccatgccaggctaatttttgtattttttagtggagacggggtttcaccatggtggccaggctgatctcgaactcctgacctcaagtgatccacctgtgttggccttccaaagtgctggaattacaggtgttggccactgcgcctggccagtttataattttaaacattaaaataaatgcttcttgtccaatcatggtgtctcacacccagaatcccagcactttgggaggcagacgttggagaatcacttgaggccaggagttcgagaccagcctgggcaacatggtgaatccctgtctctacaaaaaatacaaaaattagctgggcatggtggtgcatgcctgtagtcccagctatttgggaggctgaggtgggaggatcatttgagcccaggatgttggggctgcagtgagctgagatcacaccactgtactccaggctggatgacagagcaaggccccgtttcaaaaaaaaaaaaaaagcttctaccaatacaaacacaaaacaagcatagacaaatagagtttaaagaacatcattggtgttttcctctaaagggaatattgatgctaggccaagaaaatcctggagttattcttgaggaccttaaggaataattgaaatgtaggatttgctcctggctttcttgtcctatattcagaataaaacaagaatggatcgaatatattctgagtgttctggccattctagtgctctctgaagtgagtactcactgtgtttcacttccctttcatcctaaagaggaaaagttcttttgaagaaggctgtttgtcctaggttagagtctccacagtcagatcattatctcctcctaatctttgatcctgttcagtctctatggtactttcccttataataacactctctatggcactttcccttataataacactctcctttttaaagcagtttgccttttttgtgtgtaatattgttctcctggttttctgacgtcctggtcctcttataatcctatgcaaatgtttctttctgtttttcatgttgactctgctaattgaggtctttgttactttttagccgagactattataatttccccaacagatacccctctccccagtgccccttgttgctttctatgcagtttacaaattattgtctgcaaacacatccttaagtctggaatacctttctggaactccttactaggaaataaagaccagactcagtgtaacattcaacagtattgaagatctaggtatttaatatgaatttttttttttaaggagatcaagaaagatttttgtacccatttttaatcctccaagaagacttaggatagcaggaaaccattgagagtcagaatgctttctacagatcttaggtgaacagaaactttcctcttcatgagcagtgaggtagagggtaattaaggcttcagagcattgcccgttatttccatcttcttcccttcctttaattctgctaaattcctttaatttgtttatcagtattcaagtatttttatccattgagctaaggtgtttcttaaactaaccctattttgttaaagtcttaattataatatattcatagtacatttaagtgagatagatgagtctctcatataatttagtggttagattagattagaattttctcccctcagaaaattaagaggaaataaaagtctgtagcaaatcacttggcaaaataatggctccttttgtaataggaatttttactcttttgatttatctgttacataagttcaaatttttacatattttccaccttttttaaaaaagagtgatatgtagtcaatatcaatttgagcaacactgttgcatataaattgaaaaggactccaattttctaattccgtacctcagttgtgatcactgttggtattttggcatttatgtagacttcctttctctgaccctactactgtgcagatatatagttgcagttttttgttgttgttaagttgatacagaaatagttgcatactatatccattatttatgcaaattttttttcatttaaagtatctgctatctttccatatattgcattttcttaaattagagccttaatatataggatattacaatatctaggttttgttgagtagttttttcttctttgaaaacatgtttttaaaataaggtttttttttttttttttttgacatggagtcttgctctgtcgcccaggctgtaatgcagtggcgggatcttggctcgttgcagcctctgcctcctgggttccagcgattctcctgcctcagcctcctgggtagctgggattacaggtgcatgccaccatgccctgctaatttttgtatttttagtagagacggggtttcaccttgttggccaggctggtctcgaacttctgagctcaggtaatccgcccgccttggcatcccaaagtgctgggattacaggcgtgagccactgtgctggccttaaaataagatttttatacactaaaagaaaacttacatttttcactccattaagtagttcactgtgaatttttgatattgaagcccatttggttgctgtcaaaaatagatttgaacagattattcagtatgactcttgtagtgaaattattgccttgtttcctctgcttaagttttcagtggcttttgccacagtccttaaaggttttataatttttttaatgtttaatttttaaatgtttgcttaatatttcttagtatgagtgtagataatgatgaacatttagatgactttttactattataatgttgcagtgaatatttgtttacatttatcttttggccaataagcaaatatttttgtaaattagaatcctaaaattgaaattggatcaaaagttatatgcacttgaaattgattaacttttcctaaatctaaaatagtatagtcttttttatattgtcagcataaatgaatgcacttatgtaaatgaatatttttaggcgttaagtaaaatattctgtggaaattgaacatttaagttgtttatacttctatggaaatcgtttacgcttttaataaagaagcacaagtttctacaaaatacattctaacagatgttttctataacattcagtctcaagattactagtaaatacttctttgaactgtaaaagcaatctttcaatattataagaaagctcttgctttagtaaacatttagaaactcagctttattatcataagcaagaataagaacagtgtaacaagttttatgcacactcctttgtaaaccctcaccagactaattgttaatctggtgccttgcattccccaaagtatttgtatctgtcgtttataagtttttatcaaggtttcagctaaaacaaataaatttgtttctggttttagctttaatttgaactgaaacagtcaaaactgagttttggggacttcacacaattcatttggatatttgattctccataatgttttaaattttcatgcacttaaatatatcattatttttgataggctttcttcctttagtcttttctttagaaggtagaaaggaagaattaaataagataaaaccaaacgggtctgaagcatgtataaagtatatatgtttgctcttttgttcttctttttctttagttcccactgggaatttgaaggtccaacaatcatctactgtccttctagaaaaatgacacaacaagttacaggtgaacttaggaaactgaatctatcctgtggaacataccatgcgggcatgagttttagcacaaggaaagacattcatcataggtttgtaagagatgaaattcaggtatgaggatcaatcatcattgctctccgttgctcatagtggaagtggatatttctcaaatgtttatttaccagatctttattgaatactttctttgtgttgaacataaagcagtccctctgataaatgtgggagaacaaacttgcagattagtataaatagcaatctgtacctagtgcttaggtgcacagaggagggaggaatagctctgtcaaggtagttgtgtaatgggggtggtccatccaggaaaattcaattagagtccaaacatgtaagtagaagtttttcaagtatgccaggccagtaggtgatgaggggaaaggaattggttatagaattccaggaagaaggactagcaggtgcaaagacactttgatatgagaacacatactgggttcaggaaatgtgactggtatggaatggttggagggaaagacaatgtggggtaggaatggcacaaagtatggacaaagaggcagggtggaaccgttagagacttgagagaacagttgaatgggtcggttggccaggttatagatggctttaaaacttgcaaagaagcagtctgggcttggtatcatatacctgttagttttcactgactactttagccttagaatttttagtttagatacaattttctgtaataggtaaaacggattaaagtagaataactctggctgaagttaatgtgagggaaaaggaggtacaagagtctcgtctctagaccttgaagacactccctgttggggtcttataatccttggagtgccgcagaatcatttgaaaaccatcttgatgtactactctgtgtttttaaataagataataggattatagaaacattagactggcagcaataagttggattgatttgaagaagagaaactgaagaagggaaagggtatcgatgcagctattgtgaaattctacagttgagattcctgacctgattggactggctcagtgggtgtcatagaggatttatttgggaggatttaagttcaaggcacatgagtaggtttaagtcaacaacttgacactgtcaacatgaaatccacactgtaactataagtccgaggaagagccctctcctgaagttaggaatttaacttcagctcttgcattttctgtcccaccggtcatccatttcttctctatccatctccttttctgatatctagttgttatcagtgttgttgaaaagcttaagtatgattcatattcactgtctataaagttcactacacatagtcatgctgtaatgcatacccgcctgaaagcatctggtctctcttttccttctttccaaagataagaataccattcacagctgtttagaatagaaattttatccaaattcttcagtgtttatatttttgttctgttatttcagtgtcttgaatattgtcaaatgacatttattagctactactggtactactgaatcttaataatcaatcttcaagccattaactgaccaatggtttcttctatcttaatgtattagtaattattcatttagagtaaaacatctcccagaacatgaaagaatacaaactttattcatgttacgttgtgacaggagactttgttggatgcgcctgattttcctgccaattcacagcttcattaaaacagtaatgctttgaaatatggcttaggaaacttcacaatgatcattaattacacctaatttctggaagagtatatgcatgtatgtgttgcggtattctcccttgctgtggcaggatgtcacaaatttttatccacattacgaaaatttaaaaattgatatggttttttctccctacgttgatatcagatattttgttttatctgacagctggcccaatgtactcctactttgccattataaagaattcaaaagcttcatatttgcattgaaagttctcaaacactttgtaaagatgatgaaagtatgtttcatcatctatgtagaatagtcaggtgttcttgcaattgattacttgctaccgagaattgaatacctactgagtgcataatgtatagaattctagatattcacttttgtgtgtttttacagttgttatataccttagtgtggctctaaaagtggaggtgacagctgtagctcttaatgtcttacactgagtgatgtttagaatcttaaattttcttttataattttagaaaaaagtatacttttctttcttatttttataaccagatccaaacacatttgcatgtagataggcatttttagtcttgaacattcatttttacttttaatcctcacttttattagtttcgtatctttttgtatttcatttcccctttcaagatgccttgagtcctttctttttaggaatgatgttgtgaataaattatttgataaaatgtctttacacctgagagtttataaggatagtttgaaaatcatgtctgtaaaataggttgatctcacctaaaaataataccatataattaaaattagaattattattgtgttgcttattgactcttacatatatcaaaaaattgctgagtcttattcagccagagcttttacttagtatgatattcattcctatatttacttttttctcacctttctcatactttcttttacttactcagcattttcctcctttcctccctcctttcttttcttctttccttcttttctcttcctttcgtattcctggtccatcttagcatgtaatctttctttatgaaatggcatgcagataggtctactgttcttacagtaaaaaacttcaaggcctcatgtctttcccacttctgtttcccattcacaacctttttagctgattcttttggtactttaccactatatcttgccatagtttatgtacctggctcctacttaattttttgtttatttgtgtattagtcgtaggcattatttatcgactcttctctctgaaagatgaaaggttagctctctttcacattcttaactgcccttttttcttaccttgtccatgtatttctaaccccctttcctcctaatatgtttatgtcataattttggctagattagtgtatacgatttacataattattactctgtaaatgctttttatgatctctgagccatgtagtatattatggctatttttctttcttatctatttgtatttttattgttattacctaaaaaaaaattttctatgtcttatcactaattcttccctaaaatttcccacaattgtgtaaacttacctcagtatattcatagatatgagacattctatcaattttaccctcttaaagatgcagagataatgcattatgtttcatcccaccatctttaatgagaagcttccatcttagattaatattagagaatgttaaaatactctgcaatcaggtaaggacgcttgaaacttcattataatgcaaaagttttctttaacacaataaatattttgaaccccttttgtgtcttgtattcataggagttcagatagaccactttatttactattttttatagagagtgaacagaaatcccatttctagtcaccagtccttaatctgtaaatcaggcagataatctgtaaatgattggttgaaatcacattgaattccactttgtgccagggacttaagttaacgaacaaattattcttacaaaaaggtataaatgtaaggttttcattctgctaaatatgtttgtcaaactgtgttgtgatttgttctcagtgtgtcatagctaccatagcttttggaatgggcattaataaagctgacattcgccaagtcattcattacggtgctcctaaggacatggaatcatattatcaggagattggtagagctggtcgtgatggacttcaaagttcttgtcacgtcctctgggctcctgcagacattaacttaaataggtaaaaaaaatttattgtttttactcttgcagatttctttctttctttccatataaacctcaaaagtgtttgaggctatttccagtatcccaagtaatttgtgagtgcatttaaagtaaaaaaaaaaaaaaagaaaaataaaacctccccaaatccagaggacatgtaagaagaacatttgtggtaagagttgccacttggagatgagctaatttcagcatgccttagttagtgtgaggaattaactaaatcaggacaatacttgggcctgtcacagagatcctatggaatactttcctaccattgtgcattaatgaacaggttcttttcctctcctcagatcctgtcaagttgcgatgtcttcagccatagttacttcaactaccactgattttgttactgattctttcttcccatgctacagtggtgattattccagaggatttctctcagtccctatttgactcttgttactatttgttttcttggttagttccatgagaccatgccagttctccttgactgtgtatgaatcattgtgttgcactgtactgacagactgccgtaagtcaatattaagtgttcagtatctaagtgcaggagaacctttctacttaagtactcaacaagtagtttgttggcacttaagttctatgagattttttgttgtaaaggaaaacattatcttgcaaagattttggggcagcatttaccaatactttgttccttcatccgtaggaaaaagaatctcaggagaaaaacctatacatggtaaccaatggggctgccaagctgatgaagtattttcagagtacacctttgtgtagctgaataaattgagatcttgaatggacatattagctcattttagtaaaatgataagagagtgcctcccactacagtttttgtttttatgcatcattaaacaatgtgtttttgattgtccactgtgttccatgaactatgctatgtgtgggagatatagtagtaaagaaaagcaaagtacctgcttccatagaattcagtataatgggaatggtaattctttagagaatcacataactatggatacataggcttcattttactgttctccttttgtgtttgaaaatgtcaacaatcaaaattttgtaaaaaaggaatcatgcaacatatttaaaattataactgtgttaagtgtaatgaagggaaattgcactgagtagtaagaatatataatggtgtgtggtatttcccaagttaaaaaggtcagataaggcttccttgtggaagtgatagttcaaatctgaaagaagaataggaattaattaggtaaaaatgtttgatgcaaattttaagattttccttctgagtagtcagtagcttttccttcttaacatagaagatgacaaaaccatcctttttttgtacataacaattcttgttttcctttagacagttgtatctgtcaagcttcttatgatctaatttaaataattgggatagaacacagctgtacatgttactattaaatatggaatatatcaaacataagttgattcctaccagttctgattttatttgtgtattttgttaaaggtactgaggacattaatatccagttttatattgtgcatttgaaggttcatcaataaatacaattcttgtttctctgggtcttaaaagatattttaaatggttatctcattaagatttaacaggaaataacagtgattcaaatcaaatagtggtgccagaaacccatacttgaattttgggtatagacaggttaccctttgcatcaatcctgaggaaactaaaactataggattaatcaggataaaaaagaattgagcaaggattcaggagggatctgtatcatcctggtgacaaccctcttctagaaaaaactagaaagtctaagaataaatgaagttgctggttctcacctggaaaggtcagttactcacaaaatttttagagtctatcttatgccataattctatcactgagagaagaaacttgtccagtcatcatgtaatcttcatgtaaatttatgtttttaattgcagaattcataccacaggcaaagtcccaatgtctgcatttgctgttaccttaaatagtcaaaccccaaagttattgtaatctttttttaacagagaataatttgcagagtaatctcggtccggtagatctttcagtggatccaaatgattgccatgaatggtttagaatttttttaattttcaagttgtttttattctgtggaatactggacttatttttgtagtcccaaaagaaaaataaatatttatttatttgccgttaagagttgtagttttgttttctcaaatttgtcctgacactgacgagattagttaaatgtaggtcatctgaaccaaatacaaggaaggaaggacccagttctgaagagtgtgggcatttcttttcttgtttttttttttttttttttttttttctataggaggggaacgaggtgaactaaacaaacaaaataaagcaaaaaagaactgatttttatcccttgaggtagaaagaatgagattacagtggacccccttgtctgcattttcactttctatgttttagttactcacaaccacgtccaaaatgttaaatagaaaattccagaaataaacaatttataaattttaaatcagtggtggctttgagtactgtaatgaaattttgtgccatcccactcagtctgcctcgacttcccttagaatcatccctttgtccggtgcattcacgttgtatttactccctgtctgttagtcacttgttgcagtatcacagtgcttgtgttcaagtaacgcttattttacttaagaatgaccccaaagcacaagagtactgtgcctaatttataaattaaactttttcataggtatatacatataggaaaaaacataatacatacaggatttggttggtactattctgcggcttcaggcatccactggacgtcttggaatgtatcccttgtggataaggaggaactgtatatggttaacctaggagctagagtcaacagttggaagagactttggggataattacatggaagggcatggtgggtggtcgtttcagatgacaagaatgtttttgaataacggatcatttgtgtcttcagactttccagaactccttgagaattatgcagaggtatttaatcagtcagaaggttgaatagtcaaattattagtgagtgaagtctattttgatgaggattttactaatgctgtcccttagatattataagtaaatcgttgttttcttttgaaatatctgaaacctagttaacatggactttcatttgttcttgtaaagatatgcaaagctatttgggagattgtcatcatctgatatttgatattcatgggctttcttcacagaagactagaaattaacagagtcatgatgaattatggctgcattgactttaaaaaacaaacacctccttaatgttatttaacaattttgaataaatttgatatggcaaacaaatcagttataatcgattgagaaaggaacttaattctaatacttgactggtgtcccataataacccataatactaagagacagttttggagggcgagaagtcctgaagagctgatagagataaaggttcaaatttgagcttctttcagtgttccttacgtcaatgcttttagtttctcatacaaaataaaataaagaataacctttttactgggaaaaggtaaaaattaataaattgtagaagcattgtttgaagccaaaaagtgtgtgacatgtaaattgaaatgaaaaaccttagagtttttgatactttttcaaagcagctaaagaattgatacttggacacaggaagaattttttttcaaaagcaatttttataaaatcagaaaaatgtttacctcttgttgggggcattgactggaaaggaatacaacagaactttctgagatgctagaaatgtttttttatcttgatggggtgtgggttttgtagataatgaaaaataaacagtaaaaaataagtaaaaaaaaaagtaagaaagttgccaatacagttttacatattcctgtgatgtttttaatcgacaggcaccttcttactgagatacgtaatgagaagtttcgattatacaaattaaagatgatggcaaagatggaaaaatatcttcattctagcagatgtaggagacagtatgtattatttattttatgccaatagtatggatttatggatgatgctcttttaagacaacaatttggctaaataattatcagtattttgaaaaaatattttgttgctgttacatgtgtgctgaatttttaaggctaacttctttgtgtctgagtaaactgaagtcaaataatgaagtcccaagtgaatcaattaatggtgattttacctcattattttcaggaatgaacttaacatatacgtttctgttcttttatttaatttaaaattttgtcttgggtagaatcatcttgtctcattttgaggacaaacaagtacaaaaagcctccttgggaattatgggaactgaaaaatgctgtgataattgcaggtccaggtaaagatttcttattatagatggacattctaaaagtctttctttctcttccttttcatgtttaactgaatttttgttgaatgataagtatttcagttttttaaacaaaacaatgaatgtgtttagatatgagaaagcaaacaatattaaagtattttgcttaaaaaatagataaagcaataaaatggtagccctaaatctaaacatatcaatagttatgttaaatgtaaatgatctaaaatattatttaaaggcgtaaattgtaagaattggtttaaaaacatgaccctgttctgtacgttgtccacaagaaatccactgtaattatatagataggtttaaaaaagaatgaaacattacattccatgaaaacattaatcaaaaggaagttggagttactttaatatcagacaatggacactttggagcaaagaatattatcaggataaagaaggatattatatgatgtaaaagaatcatttcaccaatgtatcagtcagggttcaccagagaaataggacgattgatattatggagatatatatatatatatatatatatatatatatggggagggaaaggaagaacaaatatggggagagagggatgaggcgactgattttgaagaattagctcacgaaattgtgggggttggcaagtctgaaatttgtagagcaggtcaataggctggaaactcaggcaagaggtgatgttgcagtcttgaggcagaatttcttctctagcaaacctagtttttgccctttagtcctgccactgagtggatgaggcccacccacattattgacaataatctcctttacttaaagtcaactgattataaatgttaatcacgtctacaaaatattttacagcaacatctagattagtgtttgaccaaacaactgagcatcataggctagccaagttgatgcataatattaatcatcacaaccaagaagacatcatcctaaatatatatatatatatatatatatatatctacttaacaaaaagactgacagaactgaaaggagaaatagagaaatctacagttacatttggtgacttccagcatctctcaataatcaataaaactgacagaccaaaaaatcagtaagaagacagaagaaatgaacaggattatcagcatgctggatctcattgacctttttagaacattctacccaacaacagtagagtacacattcaagtgcagatgcagtattcatgaacatggatcatattcagagtcataaaacaaaccttaacaaatttaagaatcttgtatttgtatattttttgactagaatggaattaaactagaaaacaataacagaaagataacagaaaagtctctaaaccttagaaattaaataacacacttataaataaatccatgagtcaaagaggaagtctcaaggcaaatcagaaaatgttttgaactgaatgaaatgaaaatacaaaatgtgtgagatgcagctaatgcaatactgagaaggaaatttatagcattaaatacctatgtaataaaagaagaaaggtctcaaatcagtacctaagcttacatcttaagcaacaagcaaataagagcaaaataaatcaaaatgaagtaaacataaggaaataacaaagaacataagtcaatgaatagaaaagctatggtcataccactgctgtccagcctgggtgacagagtgagaccctatgtcaaaaaaatttaaaaacaaagcagcatgcagcattcattgtcagtgaatagaaaatgggaaaacaatagagaaaatcaactcaaaagctcattctgtataaagatcaacaaaattgatataaacttctaacaagactgacggaaagagaaaagacacagaagaccaataccaggaatgaaagagggaatttcactacagacctcccaggtattactagggatgataagggaacactatgaacaactcagaacataactttaataatttagatgaaatggatcaatttcttgataatctcaagctaattaaacttacagtgaattagataacctgcatagtgttacaaccattagagggattgaattctatgttaaaaatctctgaaaataaaatcccctagcccaaagaatttcaatgacaaattctaccaaacatttagaagacaaaataataccaattctatagcatgattccatttatataatagtctttgaaacataaaactatactagagggatgaagaaaagatcagtggttattagagattgggggagggagaaggtatgattccaaaggatagtacaaggcagtattttggagtgatagatttatcgtgccctgattgtgatgggagttagatgaatctatggatatcttaaaatgtgtagaactttacacatacatacaaccaatttgcctatgttaattgaaaaaataaaataaaaacaaattatttacctggtgggttagctacgtacctaagttcaatagctgcgttactgtaagacaaaagaagcattattagggatggagttgttctctgtgtaatgacaaatacttcttcactaagaagacagaattgttttatgcacctttaaaaaaaaacaaaaacaaaaaaaatacaaccaacaaacagtaacttgctggtgcggtggctcacacttgtagtattagcactttgggaggctgaggtgggaggatcacttgagaccaggatttttaagaccagtctgggcaaaaaaccgagactgtgtctctacaaaaataaaaaataaataaaaaaaattagctaggcatagcattatgtgcctctagtcccagctactctggaggctaaggtggaaagatcgcttgagcctggaaggttgagactgcagttgcagtgagccatgatggcaccactacactccaggctgggcatcagagtaagactctgtctcacataaaaaaaataataataatgataaaaactagtctgggcatggtggctcacacctgtagtcccagtcctttggaaggccgaggcaagagaattgcttgaacccaagactttgagaacagcctgggcaacatagcaagaccccatctctatttaaaaaaaaaaacaaacttaaaaatccagcaaatacataaagcacaaagccgacagaagaggtggagaaatcaacaaatccaccatcaaagtgggagaatttgatataattttaagttattggtagggtaaacaatccaaaaattagtacactgtagaaaatttggtcaacatagtaataagtttgcttattactatttatcagtatacatagtatactgatttatcagatacatagtatatggagccctagagcaagcaactatagcagtgtatctcaagtatttttacttcatgacccacatagcaaatgatatgtgtatataacacactgggctaattgtcagagttcagtttctgtccaaaaccctaagatctggagtgattaacctttcagcactcttagaactcacttgtttgtagcacactgattgagaagcactgaaagacttcactcctcaaacatacatggaatatttctaaaaactatgtattgggccgggtgcagtggctcatgcctgtaatcccagcactttgggaggccgaggcgggtggatcccgaggtcaggagatcgagaccatcctggctaacatgatgaaacgccgtctctactaaaaatacaaaaaattagccggatgtggtggcgagtgcctgtagtcccagctactcgggaggctgaggcaggagaatggtgtgaacccaggaggcggagcttgcagtgagccgagatcgcgccactgcactccagcctgggcaacagagcgagactctgtctcaaaaaaaaccaaccaactgaacaaacaaaaaaactaaaaaacaaaaacaaaaaaactatgtattagagcatgggttggcaaactatggcctgtaggccaaatctgcatgctgttttatttttttttatttttttgacatagggtcactacaggctgtcacacaggctggagagcagtggtatgatcatagctcactgtaacctcaaattcctgggctcaagcaattctcttgcctcacctcagcttcccaagtagctacaggcatgcactaccagacccagttaattaaaacaaatttttttttggtagagacagtctcagtatgttgcccaggctggttttcaaactccttgcctcaatcagtcctcctacttcagcctcctaaagtgctgggattataggcatgagccatcacgcttgactaatgtttttgtaaataaagttttctcagaacacagccatgccttttgtttatgtgttatgtagggctgcctgagttaagtagttggctgcaaagcctatcatggcctataaagcctgaaatacttactatctggtcctttatagaaagtgttttctgaccctgtactagactagcttgtctcaaaattcttcaatgaatttggaagttttctcaccacattttctgaccataatgcacttgagttagaagtaaataagcagataaacaacaaaatcctcatgcatttggaaattaaaaataacacttaaataattcatattcaaagaaaaaatcaaactggaaattaaaaaaaattttaaacctacagataactacattaatatgcattaacatttttagaacttagggatagttacaatgatatacattaaaactggtaagaggctgggtgcgttggctcacgcctgtaatcccagcactttgggaggccgaggctgggggatcacgaggtcaagagattgaaaccatcctggccaacatggtgaaaccccgtctctactaaaaatacaaaaatcagctgggcgtggtggcacgcgcctgtagtcccagctacttgggaggctgaggcaggagaatcgcttgaacctgggaggcggaggttgccgtgagccgagattgggccactgcactccagcctggcgacagagcgacactcttgtctcaaaaaaaaaacaaaacaaaacaaaaaaaaaaactagtaagagggcccagtggctcacacctgtcattctagctctttgggagactgaggagagaggatcagttgaggccaggattcaagaccagtctgggcaacataacgagaccgcatctctacaaaattttaataacaacaacaaaaaaaactggtaagaggcaacattgaatagtactttgtgggagtttattagcttgaaatactcataatagaaaagaaaattaatcagctaagcatctcactaaagagattaggagaataaacctaagcatagtttttttcccccaaacattattatatctggaatattgaatgcattcttattgctatttcaaagatacttactctaaggaaagcaattgaattaggtagttgaactctatagtagattttctttaatgagtccttttgttctcaacctacttaaataattctcatttgaatttatgatagtttcagatctacccaaagggtgacttaggaatttaacttctaaatctatttaaatgaaaggtttataatctttttgtcatattttacagtcgttagcgtttaacaatttatagcataggatttgggtttttttttttttttcattttaaagaagaagtttatttaagcaagacacttgactaagggaagactatcttggagttattattactagagtaatttatttctacttaaagacagattgccccacaagtaacagctacataaaaacagttgtaaaattgtccttggttttacaatgataaatgaaaaacattaaaattctctaattgaacaaggtatgcaaggatttttatattgttttttgctaaaactatgacagcaaaataacatcctggagtataaagataagagctgaatgagcaggccactaggggacaaagggagtcttttcacagaaccaatgcttcttttgcccaccccatctccatcgaagtcaatctaaacatattattggccatttagttaaaaaaagaaagaaaagaaaagcaatatgcttgtggacatacaccagttactttatgtgcagtaaaagagtaggaaggggaaggtgaaagaatagagaaaactatgtagtcaggatgtggtggaaccaaattgcaactttctttttttttgagacagagttttgctcttgtcacccaggctggagtgtagtggtggcccaatcttggctcactgcaacctccgcctctcagattcaagccattctcctgcctcagccttctgagtagctgggattacaggtgcatgccaccatgcctggctaatttttgtatttttagtagagatgggttttcaccatgttggccaggctggtcttgaatgcctgacttcaagtgatccacccgcctcagcctcccaaagtgctgggattacaggcgtgagccactgcgcctggccaaattgtagctttctaattgagactgtcttcttggtctggaagagcagagttctgcagtaaaataacaggtcccccttttagtagacatctccatgtctgctgctggaacacatcagttttgtcttaagcctcacttccaaatgtgcagatgtgtctggttcattgattggctgcctgtcaaattgaaacctgatctgcctcattggcaaaccgtgccccttacaataggctttcattggtttactaagcggtgtggtgcgtggctgttcatcttaaactgcaccacagtttaagatgaaccttcaaatgaacattatccttgttctcagtcttgactttccttgggctttttgtggaccctggtgagtgtggcagtctcctcagctgctgcttcacaaaagaggtaccaggtctgccccgaatgagtgagcccctaaacaggaccaggagtggcagaagaaagaggcagcaactgagatgtgttttttctaagctgaaaggctttttttttttttttttttgcaacacacctttaacactaaagtccaatatttatataattggtcaagtaagtggagctgttctagctataaatatggcaactctgcttgctcgtcctattattgacattattcctttctgtggtctgaggtgcctcccatgaaacttgcttctaggacactaggattgagaaccatcagcgtaacatatctgttacgctacaatagtttattttcatattttagctactttacatactcgggtataatgaactttattcatagcttctgaagcagttggcacatttgagatattttttacttggctaattgttatgctaaatcttttgatttctaaagatacatgcctttgctaagctttcttcaaatgttattatttttatttagattggatcattgctattccatggatgactcagaggatacatcctgggactttggtccacaagcatttaagcttttgtctgctgtggacatcttaggcgaaaaatttggaattgggcttccaattttatttctccgaggatctgtaagtatatatctgtgaattcccttcatagatcttcttttacttctattacacttttcttcagaggtttgcagtattatgattgtagctttgacttcagatgggtgactaggaactcatagagtcttactaagttccagttaaacactacattcattactttggataaaacccgtgtgtatggcatcttctgctgttttcatgttcaagccgatgttcagctctgcagctcagtctggaagcattgtgttaatttatcacattgcatttgggtgaatccctagactagtcttgcttaggataattaggaaaagttaactttcattgtatcaagggacaggtagaacaaaattgtccttttgtccaggaaaccattaaattcttcaaggaaaactttagttatagggattattttttaaatgtctaatttcagtaacaatatttgggacatatttatttttccttctgtttcctatcagaagtatttaaagttataagaaaattgtggtttttgcctttactaatgaataaataatcaattaaattcagttacttttttttggagtgattgatgttccagtattcttctaaacaaccacgggtacaaatgtgaataagataggaccgttgcagtccaagagcttgttctgtagtcctttcctttatatgattttttcccctgatttagaagtctataaagcaaagctaagtattacacactgataatggctgaataaatcaagagcaagagataggatactttgcaaatatgcatatttattaaaaatgtactttaaaatagagattaaaattctcgtattgaatgtagaataggtaagcatttatttgtgaaatactcgaatgcttcatgtaaatactttctgagtttgtatttttagaaaggaacattttggaggctgaggcaggagaatggcgtgaacgtgggaggcggagcttgcagtgagctgagattgtgccactgcactccagcctgcgcgacagagcaagattctgtctcaataaaaaaaaaaaaagaaacatatttattaaattagttgtgaaatatttttaatgaaatatattgaaaacttctgttgatttttcatgtactgatgtttttagattctaaatggagtttaaaattttgtttgtaaatcacaagttggattagaaatttaatagtagaagtgttgcctaaggactattttaggtgctgtgagtgaaactgtattttttataacaagaattttagttgtaagggacagcttaaatataattgagatctgtgaaaatgtattctgtctctatcaccttcagaacctgtgtatctcagttgaatgtataatttataaaaattattcttgttttaatttggtgtaatccagccatatccagtatcaacaaataagtctaagtaggctccttgacaaacttgaactggccacaagagagatcagatttcacctattaaaaaaccaaatcagaccacttacactgacagtctcttctgggagtcctcaaattaagaagtctatcctttgtgaaatattacactacccttgctagataaaacttttctaaaagtaccacttaatgaaaatctgtagacactaaatgcaatgaaaataaggcattgtttttttttctccccatttcagtgatcttggtatcctgggatattgtttttaaaattatcgttataattcctttgagaatttagtgaaatgttccctttaaccaacttaggaaaaattaatatctttgtacatgattttgagctgtaaaataaacattttaaactgggaataattggagtttagttaaagagataatgtatataaatatataacatagtagcagcatataattctgtcttacacaagatttttctgaatagtataaacagttatgtagcctatctaggagtttgtgaatagagtttaaaattttgttttgaagctgcaaatttgattagaaattaaacagtgaagttattacttaaggaacttcgttttagctgtctgaacaacttactgtataaaaatctttaaacattctgtataaatatgtgataagatatgcaatgaccttaattttatagattagaaaataaaaacacactcattaatttacataactgacagattaagtgaaacttctcttctgatcacgttagcagaatgccaaatcttgtcgtggcactagaattagacggtagttttgataatacatgatttgactatagacatttgttgaaactattggtagttttaatcactcttgtaattttcaaactatctaacgggagaggattatccatcctgttttctagacaaactgtttcatctgaatgaaatatattcctagagataattatcactacttcatcttttggttttattttgcacatagaattatagttcacaatgactttctgaagctctaaagttgcagctgtgagcttctttggcctgtagggactgggaaaaagcacccccgtcctcccccaagcccccccaccaaaaaaagttaaagtgtttttaacaatagctgtgggctttttgtagtttcagaacttaggagttgcccaggctggaatgcagtggtgtgatcatagcttgatgcagccttgaactcctgggttcaagcaatcctcccacctcagcctccagagtagctgggaccacaggtgccaccccacccagctattttttttattttttaatttttttgtaggtatggggtctccccatgttgccctgcctgtctcaaactccagggctctcaggtgatacccaccacccttggcctcccaaagcaccgagagtcactgtgccaggctgagtttaaaatttcttgagttggagtttatggctattttttccactagttattaaacatgtatttttgtataaggcactgtattacattttgtggggggattcaaagctaaattagatgagacgcatcatctattatggaagatgttacttaagaagaaatgagtgtaatgtagcagagaattagataagggacgtatgaatacatataaatgctgttgaagttctgaagagagagagtgtttagagaaattagaggagtctttgtgaaggtatcactagaacttcctatttttgtggaatatatagtagattttggtgtgatactgtggatttggacattcactcagagaaggaatgagggaagaatggtggagaagaatggcattcacagtacaaaaagcaactgtgacttttaaagaagttaatatggagaagtggcaagtcttttcttctctcttctcttctcttctctcttctttttcttttttctttttttctctgtcagataccgttgtaaagactttgcttttaccggaaactgatacgttgggtcatgtaccctggccagtcagttctctttattctaacacttagccgatcagttagatttccacattccatgatatgtcagttttggtgacccttatttttccacctggtttataaagggaaagaatgtgatatgtcacccaggctctggagtacagtggcatgatcataggtcacagcagcctcaaagtttccagttcaagcgatcctacttccttggcttcctgagtatgtggcactacaggtgcatgccaccatgcccagctaacttttttgtagagacagggtctccctatgtttcccaggctggtcttgaacccctgacctcaagtgatccgcccaccttggcttcccaagatattggcattacaggcatgagccactgtgccggcctgaaaatttctcttttgagatggcatcccacagaagtatacctgcttagagctaacactggtaaaaagactatttaaccctattgccttattttactgtagttgagattgagttaaactgaaagctgaatgacctgtcctaggtcatactgttactttgtgccagagtcaggatgagcaaatggatttcctgcctgctagtctagtgtcttttctatttattgtgctgtaacatacagttttaaatttgtatttttatgcccaatggacatggtagctcacacctgtaatttcagcacttttgggaagccgaggtggggggattgctcgagaccaggagttcaagatgagcctgggcaacatagcgagactccgtctctataaaaaaaaatttaaaaattagctgagtggtgatgtgtgtgcgtgtagtcctccttgtgggaggttgaggtgggaggatcgattgaatctaggaattcaggactgcagtgagccatgattacaccactgcactccagcctgggtgacagagcaataccctgtctcgaatgaatgaatgaatgaatgaatgaatgaatgaatgcccaaatccgtaagctatgttctgtatagcagctttttcatcataggcagtttttactcttatcagtggacaacctacaaaattaactaaacacttaaacaattaacagaggaggccttgttcagagtgagaaatcattaagcatttgttgttgaaatttcttactgtactctgttttaattctgtttttttttttttttaatgttacttgttttagtttggattcctagttgaaaagggaatatgattcctttaaaacaaagatactctgctttaaagcaaaggtatatcatcctcttcatggtgattgccatggaaacaagacaatgtaaatttattcaaatagtacacagtttttatagttattgatcatgaggggaagggacagttaatccctactgatcagataaaacctcattgtttcatactaataaatggtttttttatgcttatgaaaggaaaagccagaagtgtaatttttagtgtttagagagctagtgattctagttagggaacttaatacctttgaagttattagtttgcaagcaatagaatctactactaccaaggtgacccctagcagatgtagagtaccattaacaagtgttccagggaaggaaagccaactagataccaagtcatgctttttactcttagattaagaaattcaggttgagttaaaggatcagctgttaactaataaaaagcagattaatattacagagccaggctctgtcctggttatggacttaatcttcacagcatcctcaagagataaaaatgaatatacctgcatattagatgaggaaatagaagataagtaacttgccagagctatgacgtgaactcaggtaatgtagcttaagagcccccacatgtatgtatattgggtgtgtgtgtggagggggtgcgtgtgagtgcttgtgcatgcgtgtggtataataagaaaaaattagcatttatgcctgtaatcccagcactttgggagaccgaggcacgaggatctctcaaccccaggagttcaagaccagtctaggcaacatagcgagaccctacctctacaaaaaaagttttaaaaatattagcgggcatggtggaatacacctgtagtctcagctgcttgggacgctgaggtgggaggatccttgagtccaggagattgaggctacagtgagctatgatgacacctctgcactccagcttgggtgacaaagagagaccctgtctccaaaaaaaaaaattagaactagttatctggaggcctgtgttctagtcctagctttagtacggctacacagtgacacattaggctaccatttaacatctttgaacctctgataatttgttaacaatatgggtaaaaatgactaagataaatcaaagagctccagcattccctccagctctgaaattctatgatgttttatcttattttacttacaaaaataaattatattatgtatatttaaagtatacaatttgatgttatgggttacctatagtaaaatgattactataatgaaactaattaacatatccatcatcttatattgttaaccatttttttgtttttgtggcaaaagcagctgaaatccactcatttagcaggaatcccaaatacagttcagttgtattaattgtaattctcatgttgtacattcgatctctagacttgtttatgctacatatgtttgacttttaaacattctactcaaatcaaccctaagtcagggttagcacagacaggacttgttaacaaggtagaaggtgccacattgtacctgggtgtttatatttctctaaatcttgttctgatcatattttaataaatataatcatcaggacaccaaaattcattccttagctattaaaaaattctattctattttattgttaagatttaggagagcatggtacagattctcttaactatacctatcagaagcctatgttttaagtccaatgtataggcactgctctgtttgtctctggtgggaacttaccctgctttacctaatttcatcctagcttcctttttgtgaaagatcacccttgcttagcctattttttggcaaatctacaccttggaaatagtagtaaatgacataagcatattaatatttatgatgtgatttatttttgttttcaagtcatatactggggaagattctcaaatattaaaacaatgtatctttacatttatgtatgtcgttcttgttctgttttagaaggcttgtatttgcatttttaacattccaaaaggtaaacctgtaatcataatgttttcatcaattcaataaaaccattacgtttgtaatagagagccctatagttgccttagttaagtttgctgcaactcattttatatattcttttaattttgatccctggatttttaattgattattaaaccttcattaggatatatatgaaatgtaaaaatattgagttataatctaccgttttctaaaattttatactgcatttttatatagaaattcaaattgctcataatcattctagtgaatttaagtagaaaggtatttattactaggtattaaatggcttataatattgttgacaaggttccactgcaaaatagttcaccaagggagctgtggcctcttctgtgatcaagaagccatctgtcaacttgggaagcttccactatagcacctaaccccagactacattgagtaggaagctgtaataatcaggaagcttctacctttgcatgctctgcaaaccaacgtgaacctgctgtaatttgtaaccacaaaatggatgcctgttgatacttacgaagctcatcattgtatgctgggttctttgctaatactttcttataaaaattaaatacctccacaatcatgcatgctagcagaaacagcagaggagtagccttagcctcacttcctgcttatacctgtcatgcaaatatacagaacccagaaccctagctgaaagggagtttgagaactagtatttgtattgtcccagattctgcagtggaagaattcatagtggatggaagttagaatgacccttgaattacaatcggccacattcatcacaaatacattaaataagagtaatttgccataaagctctatgtttgtatacttctttgttttttttttttttttttttttttttttttgagacagggtctcactctgttgctcagtctgtagtgcagtggtgtcatcatagctcactgcagtcttgatctcctgagctcaaacgattctcctgcctcagctcctgcttcagcctcctgagtagcggaacaacaggtacacaccaccacactttgctaattttttattttttattttttgtagagatgtgggtctcactgtgttgcccaggatggtctcgaactcctgggcttaagtgatcctcccaaagtgttgggattacaggcatgaaccactgtgcctggcccatatactacatatatttaaaagtagtatttaaatgtgtaggatgaatgaaagaggcagtaagagaacaaagtgaatgaaaaagtatttctatatgaagtgaaagcaggagagtcctctctgttagagaacaacagaattgcatatgacagactagctttcttaatatttctagaacttgatggctgtgaagagcgtcccgtaggaattctcccttcacttaggaaaacatacctcaaaaccatcagctgtttagcatgcacctgcttttcctggtatatctcagtgaagcagctaaattgtaaatgattaagtaaactttgcagtgtatcatgtgcaaaagcacagtaaaaacaaaaatgcattggaagctgtgagttgttgcactgcactcatggatgaatagctgttggttcgcattgcgtttttttgttttgttttgttttgtttttttgagatggagtcttgctctgttgcccaggctggagtgcagtggcgtgatctcggctcactgcaagctctgcctcccagattcacgccatcctcctgcctcagcctcccgagcagctgggaccacaggtgcccgccacaacacctggctaattttttgtatttttagtagagacggggtttcaccatgttagccatgatggtctcaatctcctgacctcgtgatctgcctgccttggcctcccaaagtgctaggattacaggcatgccgcattgcgttttatataattctcatggttctagtctcgagctgtaggattttgatcactgtttcaaacaataatgtgagtttgctaagaggtctaaataacaaaagctaagtgttccaaacacatatccaaacctatacactgggcaatgcatctgaattatatgtgaaatttcctgccattatttaagacacaaaaggaacattattttgataatgtatttatttgtgagtggagtgttcagaatgagcacgatgggtataacatttttgtaggtttttaaagttgaaatttagtgtaaatccaaagaatcaatagacaagtctgtgttttacttaacctatatgtttaaattagcatttttagatactgattttattcctaatttcagaattctcagcgtcttgccgatcaatatcgcaggcacagtttatttggcactggcaaggatcaaacagagagttggtggaaggctttttcccgtcagctgatcactgagggattcttggtagaagtttctcggtataacaaatttatgaagatttgcgcccttacgaaaaaggtaaacggtgtaggagtctgcctgtttgacttaattttgtttcccactccacattaaaagatcctttttgcttttaatacggtagaaattggcttcataaagctaatacagaatctcagagcctcatccttcaagctaatgaagaattgtgtccaaagaagttgcttctgcctaggttcatttttcagtttttttcttgtaacttctgcattttttgttgctatttatgtgattcaaattataccagtttataggcctctcacaagtaaaatgaattacctgtttgtttttgtatgcctattttagtcagtttgggggaagggatctgtgaggaaaggataagtcatagagcacttttcttttttaagagacagagtctctctgtgttgctcaagctggagtgcagtggtgcgatcatagcttactgcagcctcgatctcgtgggcccaagtaatcctcagccacctgagtagatgggactacagacatgcactactatgcccagctaatatattttaattttttgtatagagacagggtcttctagtgcttcctaggctggtcttgaactcctgagctcaagtgatcctcctgcctcagcctcccaaactactgggattacaggcatgatccaccgctcccagccagaacattttcttggttgatgggaagtagctgaccatggtatttagaaaacttctttctcatcgattaaagaagcagtactgaaatcaatgcggaggaatccatatatcatatttacttctggtgtgtagaagtggaaagggaatacatttgttgcttacttttttgtacctttacatgtgattgatcacttgtgagttttttctttcaaacatcttaaagcttccagagctttttctagaaaaaaaaatcagttttaagaatcaccagttctaaaagggtaatatcttattcatctttctgagaatggagtatcatgattcatgaattagatacttgcatcttaacatttgaaataatttaattttattattttttagttcgaaaactgtatcttcgggcaccaaagagcattgttataatcaagtaccagttgaattaagtacagagaagaaggtttgttttaaagaaattgttctgatttatttcattctttattgattcaaattctgtttaaaattttatattttaattcctttccaattaaagagaaaatggcatatataacaaagcataaaattcggccagggaagtgatgtgaacagactaaaatttattgtatataatttctggggctaataaagaattggaggtatttgagaaaggaattaatttgggttcttttaaacctatctgctaactcatttggcttagagtagtcacatgttataatacttatagttgatcaaaaaattgattcctaagtgttcttattaaagacacacacacacacacacacacacacacacattctctctctctctctctcacacacacacacatgcacacacacttatgtactttcttgctttttttgacctaagatcttagataactattacagattaaatactaatccactggcagacttcagctaattagaacactggaataataggcaagcatagtgaattacattttctggtgaactttttctgctttattgaagtatgcagaatgtaaatgaattgtttttataactttggcacttgctgtatcttagaacattcttttgatgatttattttctgtagttttgggagagataagacattggaatgcgtttctaactacctttagaactttagaaactgataatttaggaggttattttcaggtgattaatttgacagcttgattaggcaaagaaaaaattgtgattttgagatttttgtttcttattttcttcacatttaaaagttttttgaaactttttttaatggacctttatatgtttaaatgcagtctaacttggagaagttatattcttataaaccatgtgataagatttcttctgggagtaacatttctaaaaaaaggtacagagttccatatttctatgttctatacttgctttatgagtacttttttttctaaagagaaagaactgtcagatgttgggctatttcattggcaaaaggaagttaaatttaaaacataagcttttcagtattagaatgatcaaagtgagctataaaagaataatgttaatttaatagctaacacttcttggatattactgtttgtcaggcattatgttaaatgctaagaactttatatgtgatatctcatttaattcttacaagagtctaacagctgttactatttatcgccattttatagttgaagataccaagggttaagaagttgacaaacttgttcaagagcatacagctaatggccgagctggctttcaagtctatatttgtctacctctagcatcaagacactatttatttttctttgtatgaaatatatacaggcatactttgttttattgtgcctggctttattgtgacttgcagatattgcatttcttataaattgaaggtttgtggcaaccctgcgtcaaacaggtcatattagccccattttccaatagcatgttctgttgtcatgtctttgtgttatattttggtagttcttgactggccattcaccatttctctccctctcctcgggtctccctgttccctgagatacaacaaaattgaaattaggccaattaataactctataatagtctctaagtgtgtttttttttttttcgagactgagtctcactctgttgttcaggctggagtgcagtagcacaatctcggctcactgcaatcttcgcctcccgggttcaagcgattctcctgtcttagcctcctgagtagctgggactacaggcgccccccgatcatgtctggctaatttttgtatttttagtagagatgggtttttgccgtgttggtcaggtggatcttgaactcctgaactcaggtgatccgcctgccttggcctcccaaagtgctgggattacaggtgtgagccgctgtgcctggcccatctctaagtgtttaagagaaaggaagattcacatgtctctcaatttaaatcaaaagctaaaagtgattaggcttagtgaggaagccatgtcgaaagctgagataggccaaaagctaggccccttgcaccaaacagttagtttgcaaaggcaaaagttcctgaaggaaattaaaaatgctaccccagtgaataaaacaatgataagaaagcaaagcaggctttttgctgatatggagaaagttttagtggtctttataggagattaaaccagccacaacattcccttgagccaaagcctaatccagagcaaagccctaactctcttcaattctctgaaagctgagagaggtgaggaagctgcagaataaaagtttgaggccagcagaggttggttcatgaggtttaaggaaagaagccatctccataacataaaagtgcaaagtgaaacagcaagtgctggtatagaagctgtagcaagttatccagaagatctagctaagatcatcgatgaaggtgcctgcactaacagactttgaatgtagaccaaatgctttctaccagaagaagaagctgtctagtactttcatagctagagagaagtcaatgcctggcttcaaagcttcaaaggacaagctgactctcttgttagaagctgatgcagctggtgactttaagttgaagccagtgctcaattagcattctgaaaatcctagggcccttaagaattatgctatatctactctgcctttgctacatacatgtaacaacaaagtcttgatgatacctgtttacagcatggtttcctgaatactttaagcccattgttgaaacctgcttagacaaaagattcctttcaaaatgttattgctcattgacaacacttagtcaccaagagccgtaatggagacatacaaggagactaacgttgttttcatgcctgctcgcttaacatccattctgtagctcatggatcaagaagtaaattaaccttttaagtattattatttaagaaatacagtttgtaatgctttagcttctgtagatagtgattatcagagatgggtttttaagaggttttccagaaaaccttctggaaaatattcactattctagaagtcatgaagaatatttgtgattcaggagagtaggtcagaatatcaatattaataggaatttggaagaagtcgattcttattaaaatcaagagtttagtgatagacatactgagtttgggatacctgtggagtagtccagaagttaatttaaatatatgggcttagtgtacagaagtgagcagggtgcttatatatgaataaatattattttaagatatatttaaattttccttaaaataatacctatacttgatataaaaagttaattggaaattagtggcttatgacaagcataccagcccacactcttcccaaacccactttgctcttattcatagaagctgtcatcttcaaatcttccagctgatttccctggcgtgtgccttcttatttctgaatgacacgcttagagtactatttttttgacttagcaattttagaaattttctactcatctcctattatggtagatttcccctccttcattcctcctccaatataattatatttcgtcatattaataatttgtttatatatatttttaatataatatgataatattgtatttatattattaaaactacacaaatattatatacacactactaacccaaccgtgttattatggccaccactacctttatttttttccttgtgttagtgattgtctttgttttattttcttggttttgagtattccttttactaattttcttttttcctatttcaatctctcattatttgtttactcatttggagtgttccttgacttttatcccctcttacctagtgacattttaattttagttatcaaatttttaatttctaagaatgcttcttgttctcttcttgtttcttcttccccaccagccaaaaatctatgatgttatagcaaggatcatacattgtttcccagtaggttaagaaaccttggttaaaacctgttgtatcccagtaagttaaaagacgttaacgtgtcatcttcagtatggatgaaagaatattttctttcaaaagcagttggttgaggaagagaatgggacaaatgctctttttaaaacaccaattttgtgatgaactcaaattgcaattttaactttaccattataatgaatgtatttgatccaaaatgtttaaaatctaggctgttgtcatttaaataacaaattaccttactggtatcatgaagaataaatgtttgtactgatttggaaagacattctcatttaggggatgaaatagaaagtcaatgaggagaaagaaaagcttttattatttattttcttttaaatattttagtatcatggtacagtcaccagaaaaagcttacagttcctcacagcctgttatttcggcacaagagcaggagactcaggtaaggcttttgtaaaaaggtaattagtttatgataggatagttatgattctatgtatgcttaaaattctgtattttgccagcattttaaaaattgttcttaagctaagagtctgagtttatatttcagtttatattcattctaaggaaaaatgtggtatctgaagctctaaaaataaaggactagatcttttaagtacactttaaaaagtgttgtttctttgttttttgttcagattgtgttatatggcaaattggtagaagctaggcagaaacatgccaataaaatggatgttcccccagctattctggcaacaaacaagatactggtggatatggccaaaatgaggtaaactatcttttgcatgtgttctatttatttccttctaacaaaatagatttggaaaatatatctaagttgataatatgaccatagcttccactgtcacatctgggaggtgactcagattccccctgctgcgatgcttatctctttgccaagctttagtaccgtgtttctgtatgaataaaaaccagttacgttttcagcaatcatattcaatatttataaaatctaactcattatttacccaccctgcattttatccaaatgccgaaactcctctttttggattctttatttttgattatcttaccatcacatttgtagtcagaggttcctaatgcttaaaacctctgatctgaattttctctcctccaatataaaaccccttcgtcttcctcttcttcttcttcatttttttttttttttttgtctgaagacttgtctcactgtgttgcccaggctggagtgtagtggtgcgatcactgctcactgcagccttgaccccctggactcaagctatcctcgcacctcagcctcccgagtagctgggactacagaacatgccaccatgctcagctaatttttgtattttttgtagagacagggttttgccatattgcctaggctggtcttgaactcctaagctcaagcaatcttcccgcctcagtctccaaagttctggcactacaggtgtgagccactgtgcctggcctctttttctcatttaaatacttttcataccttttgtaaaacgggttccttgttgcctgtctatgccttcctcctccttcttaatgacaccacgttaattctgactgttttcccttggcctgttgcagaagcctcttaactattaacccttcattctctctctctgtttcatctgatatatgagtaccaaactaaatcttcctttatcatatcttacttctgcttaaatgttttttttctagcttagaattcaaggccctctatttatgaacttaaacttacttttccctctaagttacagaatttgaaatggtttatcttacctggattgtttatcacttgttgaagatccattttcaacttccatatatttatttacagtgttgcttctccttgtagtttccttgattcctcaaaactccttttaagaattcttgaagatctcgctttattactatttctcgctttattactgtaaagactatgagaaggtctttcatgatcttatcagcaaagtaattcctctctcttgaattcatagaggactttcagatgaattctaaagatgcttctgtagcacttaccacacaatgctatattttatttttttgtaattagtggtaaacaagtattattatatcttctagattttaaactccaaataaagatactagctccttacctttttgtgtgtctcctgtagcacctagcacaatgcctcataaacaggaggtgatcattaaatatttagaagaaattatttcccaagaatagttgcttggtaattgtatttgtcttttacttccttttaaaaaattgtttctgtcactaaattgcatccaatagatgttacttgagtgcagaattttctaatgacattacacagtgctacatctgacactaattcttttgttaaaaaataaatattctggccgggcgctgtggctcacgcttgtaaatcccaggactttgggaggccgaggcgggcggatcacgaggttaggagatcgaggccatcctggctaacacggtgaaaccccgtttctactaaaaatacaaaaaattagccgggcgtggtggcgggtgcctgtagtcccagttactctggcggctgaggcaggagaatggcgtgaacccgggaggcggagcttgcagtgagcggagatcgcgccactgcactccagcctgggtgacagagcgagactccgtctaaaaaaaaaataaaaaataaaaataaataaatattctaagaccatactttaatagaggtgttttttttttttttttttttttttttttttttttttggtgatagagtctcactctgtcacctaggctagagtgcagtggcgcgatctcggctcactgcaacctccgcctcctgggttcaagcaattctcctgcctcagcctccggaatagctgggactacaggtgcgcgctgccacccccggctaattttttgtattttagtagagatgaggtttcactgtgttgtccaggctggtgttgaactcctgagctcaggcaatccacccgccccggcctcccaaattgttgggattacaggcgtgagccacagtgcctggcccagaggagatatttaatgaaaaataataatcattagataggcagatttttagaaggagggcatcgaatgggttcttggatattggacacaataagaaatattgagctaaaagtctgaaggaattggcagatatactgttacaggtaaacactttgtagaagaaaataatgaatgagactttcttttgagattttcttagcctcttagttgttcccagttaaagcctcatatttttccttttcatgacaataaaaataataataaaatcagtaataaagtgaatatatgagatgttaacctgttcctttatgacaatgtcctgtttaccaattaacagtgtgtttttgtggtgatgggggcaagacaaatctttaaatggtggaaagcaaagaaagaaattataaaacatgattagttgtattatacgttgtttttggttgttggaaaaactatacatttattgagagaatcattaggaagctgaacatcagctatattgctggagtgatactgtttcagtggtttcttgacctttttgttgttgttgttgttgttgttaaacacagaccaactacggttgaaaacgtaaaaaggattgatggtgtttctgaaggcaaagctgccatgttggcccctctgttggaagtcatcaaacatttctgccaaacaaatagtgttcaggtaaaatactgtggtttgcaggagctcttagagaataagcattttttgtaaccatttcaaaagtaccctccagaagcaacatttgctcactttatttgcatttccatactggacacttagaaaatgaattaaaattgtttttacagtcaatctgttgtaaaaacatgtcagttatctacttttaaagatgatactaaaaagtagttgtccaggctgctgatgtctttctatttcattgggaggttttgtttttaaattggaaacattattttaggttgataaattataattttacattcaaatgtggtagttggaatttaaagctggaaagttatccttgctatgagttggtcaggagctcagccactttcttttggtttagcatcttctctaatctccctccccttccagtaatgctgtcttttgatagtaagtggatttcatattattctcttcagttttaatagtgtttccttcatatccttttattattgcttgttctgccctaagtgaccatttccagaaatgtcatttaggattttctctaaactccacgtagcagactctataatgcatactctgcagaaggtgaggcagtgggaggtagaggggagactactagactaggagtcacggaatcaggactttagttcttccttacagttgttcacctggtgaacctgcacatgtcctttaatttccttgggtctccatttcctcagctatacaatggaaatgacacttcctcccccacatccaggaaacaacagatgacattagaaaatagaagacatgggataagtataaaatgttgaaagagttaaacacattcaaggcaatattaagggattattttttacttccaagaagctcctggaagctttgggcaggcacagttggatcctactttagaaaaatctttctctaactataagtagaaaacccttctgctttttgaatgtagcatttccctcttttgatatagagtatctttggcaactttgaattttctttttcatactcttatataagacatcatgtgaaaattcttatttcttactgagtttttggaaatgaaattataatgtcttaatagtttgagaaagaatatcatacctaccagcggtaattgagtaagttccctctctttggacacttgaaagtagtatcttctttcatgaattagtgatattatttaataatgaatgagtgatctctcctaactccccttcagaagaggaaaatgaagtaggggaaaaggtaaattccccaagggataggtatgaaacctttatgaaccttctggatagagaagatgactgctgatttctgtgattagaaattatacttgggttattctgcaaattgaaatgaattatttaaaaaaaaacaactttaatgtttattaagcaagttttgttattcatgagtttcattagccttttattttttttttaaattttgaagtaaaatttcttgctgtcacaatacacattaaaaattacaaatatgacacatattaaacacattaagatggccgaataggaaaaatatgctaaaatatttttatataaatacattttttgagaattttgagaatttctggaacaaagtaatgatataatccataaatgtacaattaaagagtttaaggatatccaaaatacttggcaaagtaatctgaaataatactcttaggaaggtagggcaagaatgtgattctagtaagcaaaaatgtgatcaaatcgtattctagtcccagctactcgggaggctgaggcaggagaatggcgtgaacctgggaggcggagcttggagtaagccgagatcgtgccactgcactccagcctgggcgacagagcgagactccatctcaaaaaaaaaaaaagactatatgaacatgtatggcataaatatgtacaaatattatttattttaaaaaaattcaggggtagggacagggtagttagaaaatatctaaggatgttcatgaaataatactggctatgaatgacagttgatgaaaccgggtggtgcccatcttattccctcgactcgtgtatatgtttgatatatcccacaataaaccttaaaaaaaaaaagatgagtggtcaattataggaagatataaatagaaaaggcaataaggacaaaagttggcaaagcttacctaagcactcttcagataaaaagacatttttgctaactagatttgaatattatagtttaattgtcaaggaaaatgcctcaacttaatctttgttaagagactacttaaggcactatcagaagttccctcatggcaaggtgcaatccctcatgcctgtaatcccagcactttgggaggccaaggcaggcaggttacctgaggccaggagttagaaaacaacctgggaaacatagtgagacccgacctctacaaaaacaatttcttaaaattagccaggcatggtggtgctagcctgtaatcccagctatttaggatgcttaggcaggaggattgcttgagcccggggatttgaggctgcagtgagccatcattgtgccacaatactccagcctgagtgatagaaaaaaaaaaaaaaagtgtctttgttatattccaaacttgttctcaactttcaggtgagctggcttcctgtataactcttgtataggacagaacatactggttggggcaagtgaaactgtctagttgtatgcctcataaattaatgaatttcctttctaatatatacactgatatttatacacacatacacataaaaccaagctcaatagatgggtagtgcagctctattccccaaaacccaactaccctgtaacaagacacattagacttttgagattgcaaggatgaggactgaaatgctggcctagaccatggtgttgccatagtggggtgaccagtctgaatagccaacaatgcttcctcagtaaatacccattttgtcttggtgggatttctataaattgcaaaatgcagctattatgaagctgtaaaagagaaacagaaacatgtaacacctgggactgttttattaggcccaccgtatgctcagaacatgaaatctccactgctagggttatttgattgaaattatcttttgtgttgatgtgagagtttagctctgagattcttccacatgtaaaatgtaatcccccaaagtatttggcaagcacattttattgccttgggtcagataattgaaacattaggcatcatatatatagcatgtaaaaagtaaaacagaaacatttatgtttctcaccaagcagtaaattagtactcaactaataaatttcttaaactccctaataacagaatatggaaacaaaaaataaatctttccaaaagaagagctcatggacacatttcctcatatatgtatacataatatagtagaacacatgataaataacctataaaaatgataccaatatcattcatcaagagacgaggctcttctttaaattattaatttcatctgttacaggttttattatgactgtagtatgctgttttcatctaccttttatgtgtagttaaaaaaatagttttctatctctttacctttatttcagcctttaaaaagattccattattttttcattaatcttgtttttcagtttttcccattttttcttttaaacatttcttaaggaaccatatttaagattttatagaatacttagatttctagttgggatgtatcatttaaaattagatatgtagagagagtgttatgatatatttccttacgatatattagtggttatagtacctaaatttgaatagtgattctgttcattcattcattcattcattcaatattcacttccaggagattggggacttatttaaagacagagtagttcacattatagttcctttttttagtccttcttattcgttaaagaaaagactaggaaatgtttgttattacaaatattttattaaaattttgtgtgctctagcattattttaccttttaaaatcaatatgttaaaaatccaacttctttttgagctccccataaaaagggaattatttgttgcttatgggtttaacttgtgttatttttttcttaatggctaattatcatacatatattctattattgtattgatattactgatcatttgtgctacattaaaaattctgtagacagacctcttttcaagtacaaaacctcaagaagaacagaagacgagtctggtagcaaaaaataaaatatgcacactttcacagtctatggccatcacatactctttattccaagaaaagaagatgcctttggtaagtgtgactttcatgttacagggaatttttttagtttacttaaacttgtgttttatcagctttttagtattaaagttctgacttgggatcaatttcctccaaccctacaataaatctcagtttatctttaattttaaaagagaatgttgttttctttttctgttaagcctccctgttaagtaatagcagcaagtttagtttggccatgaatatcttctagagattgtatcggggtactgataaacacatttgtagctcagggatactgcatcagccatattttaaaatgggactaacagtttaaaaactataaatattcacagtgttaagaaacaatctcaagatgcattaagaaaaaggaaggtgcaaaacagaaaaacaaacgtaaacgtgtgtgcatatgcatgcttatatagtcacatattcttgtatgtgtacaaaaaatacacactggatctctgcaagcatagccaagcaactggaaatatgtttttaaaaacttgcttttcattctatctcttctagtactgttttgatgctctttgaaaacaatctaattgctgtaacaaatgaccatacgtaggccgggtgtggtggctcatgcctgtaatcccagcacttcgggaggctgaggcaggcagatcatttgaggccagggatttgagaccagttggacaacatagggagaccctgtctttactaaaaatacaaaaattagctgggcgtagtgacgcatgcctgtaatcccagatacttgggaggcggagacatgggacttgcatgaacccaggaggcagaggttgcagtgagctgagattgcgacactgcattccaacctgggcgaccgagcaagactcggtctccaaaaaaaaaaaaaaaaaagaccatatgtaatgtttcttcattgttctaagataaatctttaaggctgttgaggttttttgtatacaaaatggagagtaagttttaatgggatgggacaaaatgaggcttacagttgagtttaatttgagttcacatcctgttgacattaagttgatttggaacaagtgatatggtccaatgcctgcttttctattgtctgtggttccatccactagtgcctgtgttacacacctcttgttcaggttttatcatttaaaataaataagaataaacagtccatagcttatcttacttactgaataaatgctctaatttgacagtcatgtttcttaaagttccttacaaaggccattgcccaagaaaccaaataattccattatactatttttgaaatagaacacataataaatgggaattttaagttcagtttcttatgtaaacaataacttctatgtacatgttaaatatgcctgtatatacctaatttgaccatgtatgtatagtagaaatgaaaacagttactaagaaaatttgttattggctccaaattttctgaattaagtgtattctaatgctcagccataatatggggtttcatgtgttagtttatgtattcatggttaaaaatgtgaagactgttatatcttcatttgtgtcttttggtattatttggttgtattttattgtgtgatatggtggtataattatccttacctcccaggagtttgagagggtcttgccagttaaccgcagaattaaacatgcttaggactaattaatcaggagcaatactacaattagttggaggtaatttgaaacctggtttcaaataaccctgatattatgcacacatggtgcacacttttctagtagacatttaatgaaagtaatttaaaacctacctttgaaggatgaaaaacattgccttaaatgctctattctgtgaaagtatcaacatttatgcaaatacagtctaaattcagactttgaaaatgtattgaaagagaggatcatgaaataagttagagctgagtgacaaagctttctgagtgtttaaaagaatgttttacctaataaatatctgaaatgtatttggagccacatttgtttaaagaactgtataaatatgtagcactgttcatgtgaagttcaatagtaggaaaatgctgacagcccttgtggaactgtggttattattattttatgaatagagccaatttcaaacacctattagagtcttctcaggaacattttatagaatgcatctggagccttatgttatctctaagcattttaggatttgtcttcttggaaattcatgtaaccaaaccaccatgtgttatttcaagtgtatatagtattgggttacagtttactatgttttcagaaggttgtgacaactattagacttacagagaatgacttctctgccactaacggctttctaaagtgaatagagaggggcgaggattgaattcttcggtaaagctgggtgattttgttttattcaatacagtataataagtataaaaagtagaacctatagagagctataatgggggtagttttaaagaaattctgaaaatgaaaaacttaagtaaaggtttagttcattgtttatttcacactgagcatttactacctgaatgttttggacattttatttccatgactggagtggacacttttacaactcactgggttctttgctgatctttctctagaagagcatagctgagagcaggattctgcctctcatgacaattggcatgcacttatcccaagcggtgaaagctggctgcccccttgatttggagcgagcaggcctgactccagaggttcagaagattattgctgatgttatccgaaaccctcccgtcaactcaggtgagaggcatggcctagctctgcacccttaatgacttgatgaagtaaacaagcaatccactatatttttcactgttaacagcattaatcctttatgctattatgaaaaccttacttttgtgattctttttcttgttttaggaaaacaatctttcttcccattatcactcagaggaaagtatactgagaaatttttttgttttgttttgttttttgagacagagtcttgctctcttgtctaggctggagtgcagtggcgtgatcttggctcgctgcaacctctatctcccaggttcaagtgattctcttgcctcagcttcctgagtagctgggactacaggcgtgtgccaccatgcccagctattttttgtattttttgatagagacagggttttccatgttggctaggcaggtctcgaactcctgacctctgatgatccgcccacctcagcctcccaaagtgctgcgattacaggtgtgagccatggcacctggccaatacactgagaaatttttattttccttttcagcttaaggttacaacttccccaccatccaaaacgtgcactttcattttttttctaatttctatctcatcacttgcaaaaaccatatttttctccacattcattcccagtagcttcctgactcctagttcttccctaaatccttctgagtccttgtcattggtttcgcttgagtagcctttctaatcaacacagtcattggtatcagttactgtgacatggaagggacagaccaagttctgtgggccgctacgtagaaggatttcctgtcactttgctgcagaacctcagctcgcggagagcaagcccctttgcttgccctgtagaaatattttaaattattatcctttttttttttaacagaagtaaataggagatacgttagaggattttctctcctagatgtgtaaatacaaacttggggtcttataactcaataaatctgataaatttcttttgactgttaggatagagcagtggccataccaatagcctcatctccaaagctgcagtgaagatactttttactaccttaaagtctttcccatttgtgaacaacttgtgaacaattccccccaagaatttggaagatcactctctgaaagcacagtcaatactgtacttaaatggatctgagcaaaaataagtcacttagaagacaggattatttctagacttgagtgtgacttgactgaaggtctaaagaacaaacagctccttcacttccattgatcacggtggaagcacagggaaaggacagacacggaggcaagttggagtagtgctcatctaagttccagggatgcgggggagtggccaggggacttcaggtatagtaaataaataacctatttataagttatgtcaatgtcatgtttgaaatagaaaaccaaatactgcatgttcttacttacaagcaggagctaaagttggtgcatatggatataaaaatgagaacaggccgggcgtggtggcttgtgtctgtaatcccagcactttgggagacctagatggaaggattgcttgagctcaggagttcaagaccagcctgagcaacatagtgtgacccccatctctacaaaaaataagaaaattagccagacgtggtggcatatacctatagtctcagctacttgggagtctgagtcaggaggagtgcttgagctcaggagtttggggttataataagctgtgatcatgccactgtgctccagcctgagtgacacccagagtgagaacctgtctcaaaaggagaaaaaaaaaaaagtaacagtagacgctggggactactgaggggagggaaggaacaatggttgaaaaggtgggaagggacagtggttgaaaaactacgtgttgggtactatgctcactatctgggtgatgggatcaattgtacctcaaacctcagcatcctgcaatatactaatgttacaaacctgcccatgtactacctgaatctaaagtaaaagttataatttaaaaaaattataataaaatcagaaaataaaggtctgagatggaaaattaaaagaccaaagccacccataagcacaataaatccctccccccaaaaaattatatctattaaaaaaaggtgttgcgccaggcactgtggctcatgcctataatcctagcactttgggaggccaagacgggcagatgacttgacttgaggtcaggagttcaagaccagcctggccaacatggtgaaaccctgtctctactgaaaatacaaaaattagccagcagtggtggcatgcgcctgtaatcccagctactcaggagactgaggcaggagaatcgcttgaactggggaggcggaggttgcagtgagccgagatcatgccactgcacttcagcctgggtgacagagtgagactctgtctcaaaaaaaaaaaaaaaaaaagaccttgtaccctgacaagttttagtttgtgcaggaatgctagaatgactcaagattggaaaaatctttaaatgttaattacacaataagggtaaaaggagaaaaattacctaatgtcatctgagcaacaagaagaagaaatgaaaggcattaaaaattgggaaaaatttatatttgacagtatcttaacaacgaattctgcttctatatcacttcctagctttctgatgataacttcccgtgcagatctgtatgtaaggaatggacgtagtagtcatgctaatctgagtatttatctgtgtgatacttacgaattaacgatgtaagttaataagttagcatttcgtgaacctggttaataccatttgctaaggttaaattagccaaatcctgaagtaagctgtaaaacatccaaggtagggtagagaggcatcttatgagaaagctggccaactctcctggtcaccttctaatcttcctaacttcagaaatcaaggcagagagaggaaaatagtaattactttgtaggattagatttatggttgtcgaaacctttgtttctccagtgcagaatgagatagcgttttagggaaagccaaagactcagatgtcttcttcatgctcatcgtgtggaatttttcttcctttagaaatgtattgtctctcagggcttaaagcaatttgcatctttcgatgagacattgagtaataggcaatattctctgaaataatttgtgcaggctgggcacagtggctcacacctgtaatcccagcactttgggaggccgaggcgggcaggtcactgaggtcaggtgttggagacgagcctgaccaacatggtgaaaccccgtctctactaaaaataccaaaattagctgggcttggtggcacacacctgtaatcccagctacttgggaggctgaggcaggagaattgcttgaacccccatgggaggtggaggttgtggtgagccaagattgtgtcattgtactacagtctggacaacagagtgagactctgtctcaaaaaaaaaaaaatagaatttgtgcagttccccccacccccttttttttttctgttggcatttttgctatcatttagctgccttctttatatcctgaaacttacaggtggtgttggtctagtcagtaagagcaaaggctttgggaatagatagatctgtatttagaccttggctctagcatctcattgttatgtgacctccatcaagtgacctaatttccctaatattcaatttcctcatctctaagacagggagttaatattgcctctcttatagaattgtgagaaatatagtcatgtgtcgcttgatgatggggatgaattctgagaaatgtgttgttgggcgatttcattttgtgggaacctcacagggtggacttaaacaaacctagatggtatggcctactacacacctaggctgtacggtatagctcctgtcttcaaacctgtacagcatgtgactttactgaacactgtaggcaattataacacagtggtatttgtatatataaacatagtgaaacatagaaaaggcccagtagaaatacagtgtaaaagattttttaaaaaagctgggcatggtggctcacgcctgtaatcccagcactttgggaggccgaggcaggcagatcacttgaggtcaggagttcaagaccagcctggccaacatgatgaaactccgtttctactaaaagtacaaaaattagctgggcgtggtgttgggtgcctgtaatcccagctactcaggaggctgaggcaggagaattgcttgaacccaggaggtggaggttgcagtgagtcaagattgtgccactgcacttcagcctgggagacagagcgagactctgtctcaaaaaaaaaaaaaaaaaagagataaaaaggtacatctgtacagggcacttaccacgaatggagcttgcaccctgggagttgctctgggtaagtcagtgagtgagcggtgagtgaatgtgaagacctaggactgtgcactgctgtagactttataaaccctgtgcacttaggccacactcacccctgtgatacgagtctacctactgtataacgtacctgcatatgtacccttgaaactaaaacaaaagttaaaaaatttatcttcttttgccaataataaattaaccttagcttactgtaatgattcttctttatgaattaaaatctttttactcttttgtaataacacttggcttaaaacacaaacatattgtacagctatacaaatatattttctttatatccttcttctctaagattttttctgtttttgattttgttaaatttgtttttactttttacattttttttgttaaaaaccaagacaaaaacccacacatcagcctaggcctacatgggctcaggatcatcagtctcactatcttccacctccacatcttgtcccaccaggtcttcaggggcagtcatatgcatggggctgtcatctcctgtgataacaatgccttcttctggacacctccagaagggcctgcgtgttttacagtgaacttctaaaaaataataaaatgtatagtatagcaaacacataaacatagtaacatagtcatttattatcattttcaagtattatatactgtacataattgtacatgctagacttttacacagctggcagcaaggtgagtttgtttacaccattaccaccacaaacacatgggtgatgctttgcattgtgatgttacgatggcatgatgtcactaggtggtaggaacttttcagctccatgataatctaatggatacttgttcctgttggctgcccgtcgttgactgcaacatcattatgtggtgcatgactgtaaattagatactgttcagaaagctttggcacactggtaatagcaaatggtggtggcaaatatgatgatgatgatgatgatgattgaagacatagatggtaaaattttatggtgtcttaaaagtaccctctaaatatgattatttttatagtctgtccttttgaataggcacttaagaatgtatgaacttaataagtatataagaaagaatgttccccaaaatatatcttacagaggcatacaatttaagaattcaaacaggttgtaatggggtgtgtgtgtgtgtgcacacgcgcacgcatgcgtgctcattcacactaaagaattcttgggcatatgttcctgaatgtcctaaatggacattctaacatcacttcattatgggcagagggaaatggtaaagaaaaatttcatattatattattcagccacatattgacagcatctgttttatttgcctatggtaaagaattgaagcactgttaatttgctttttaaatcatgtaggcacaaagttatcgaactttagatttagaaatgaaactggaaatcattacactttccctttcctatccccaccctgttttggagagaaagagtgtgaggcttagagagttataaaactgttttaataccatgtctaagattaataactgaacaagtttctctttttactcgtgttaaagttgtactgccaattaacttaaaagaaagaaatatgcaatttctaatcctgatataggatatgggtatataaactctaacttgatgagtgaaacaaattaacttatttataatcagtttcatatctttatttattgagtgtctttaaataccccttacctttaaagtaagaaatattaaaatcaagcagaatataataatgaaaaattcttaagatatacttactaaaaacttatccttcggttaatacactgtatgtaggttgtacatacaatatgaaaaagtatatttttgtagcctacttttaaatccagaatagaggaggttaagaaggttgtgataaccatgagctcttttttttttttttttgagacaaggtcttactctgtttcccaggctggagtgccgtggcacaatcatagcttactgcagccttgaactcttgggctcaagcaagccttccacttcagccttccaagtagctgggaccacacctggctaatttttaagtatttttgtagagatgagttctcactacattgcccaggctagtcttgaacccctagccttaagcgatcctcccacctcagcctgcctaagtgctgggattacaggtgtgagccactgagcccagccctcttttatttcttttgatagtacactcataatcattaaactatcatttctggatgtgagattgtgcttttggattcttattttttctttataaaatactttttgttctcttactggagaaaacattgttggattataaatgatataacaaggaatgaggatatacatactataataacgattcagatatgttattttcatattttatttaactgtagccatgccacaataatttagagttttaaagaacaagtttgattgaaatctaaactttgtacaatcctgaattgagaagtttcctgtattttattatgacacaatatttacctaaaaatagagtaattatgaattgagaaaacatagctattaatttcatactcttatttgttaagtagattttgtctggaaaactgttcatatttaaaggagctttgtacctttgtattctttttgtttttccttgtttatataattttaaactctgtttatggatttgggattctaactatgctaaataataaattaaggcattgaatgaagtacctagacagtattttgattaattttattcccccattcttaatgtgcatgtaactggaaaattaagagtggcttccaagggatctactacaaaagtaaggttaatatgatctcttttaaaacactgaaggcgtgtagccagtgttgtcattaattctgcagtagatattttcagcacttatttacatgggaagttagagcagagtaagatgcacctgtaaagctaaatgccacttatttgcatatatataaaacgcaggatgaatttaccatagaaatataaagggtacttatagaaatgtattagaaaaatatatgaatttttaacttatatctagaagttaactttatacatttaactttaaatcattaatagtggtttaacaccataagcggatgtttatgcatcatcattttatgaacaaaagacattctaattttagaaataaagtgattcaaaagagaataaaatatcttactttttcttttaaaattaatttgtttagcgcattacatgataatagctcaagcttgtgtgatttttccctaaaaaattggtttataaatattacatttatagtatgaagaaattaatcatacatagtttatttatctaatttctaaatacccatggaagaaaatgaatttaatggaatgtagttgtgtattacttggtttcgagtgtgggaaaatttatatggtctttctaaaacagcactgtcagtagaaatacaatgtgagctacatatgcaattttaaattttctagtagccacattttaaaaagtaaatggatgcaatttattttgataatataatttaattagtctactatatttaaaattttatcatttcaacatgtaatcaatatgaaaattattaatgagatattttacatacttttttctgtaataagcctttgtaatcaggtatgtactttatatatacaacaaatcttctgatgctaaattttaactggaaatacttgatctgtgtttagcttttgtaaaatttactgttgaacaacgtggactaatgtgcctaagtggttccaaacatattttaaaatttgaagacaaataaaagggaactcaaagtaaattgggatacatacatacaacagaatactgagccattaaaaaatgatgaaatagtaaaattgggggaattttgatgatactaggatgatataatgaccaagagacaaatacaattttagtttggttgagagatgtgatcatcacgttgctgattttactatgtatagaggttatcttttcctttctaagattttgaaactttaattagttaacccacttacctagtttctattagctgtgtaactttctcttcctgttttttgttttgttttgttttgttttttgctttttaactgcagtattttgaggagtcttggagtagcaagctaatctttggaagaaaggaaaatataaacctgaaaactaacaatttaaagaacgtcttttcaggttgtcatttgaaaaatacttgatttctgatcactgatttgaattgagtgtcaaatatttgatatgttttgtaaattaggtgaagatgagtgagtaggttctaaactgcttgggtttaccgcactctggagcattgcagaagaatgtgatgttggaaggaagtgctgaaacataattattggcttgcctataggagggtgctacataattttagaaggtgtcaagaaattgacacagtctgaattagttctgttgagttgcaaaaaatgtaaagtttcttgattctgaaaataagaaatatgttcccagaaatctcatctagttaatgtgcttttaaaatcattgatgtctcttgttattacaataatagccattgaaagaatcttttttattagaatgttatttacaggtacgattagcttctatttaaataaattatttttatacttgatcttaggcaaaaggccaacaagtgatcagaataaattattttaagagaaaactaattataattgatatttggaattggaagcacaatttcctttagaacaattccacgaatggttgttttgattctcaaggcagcccacaaaagacagtttgaaacacaatttatgcagtgtcaatagtactgacctgactttggatcttggaggcaggggcttcaggtgatacccgagtggagtttttactccatttccattccgtaaggctataggcatttgaaagaggaaacttttctttggcaaccttccaccttcctttctacagaatatttcagtatttctagctcataggttttctaaaatattctctgtaatttattttgaaatggagtttttttatcgtttacagatatgagtaaaattagcctaatcagaatgttagttcctgaaaacattgacacgtaccttatccacatggcaattgagatccttaaacatggtcctgacagcggacttcaaccttcatgtgatgtcaacaaaaggagatgttttcccggttctgaagagatctgttcaagttctaagagaagcaaggaagaagtaggcatcaatactgaggtattaattatatatagaattttcataaagtgtcagtttgttcaatttgcatatcctagtactagaatgctgtatttttttgaactgttatgaattctgatatgattactttctctatgtgctacatttcctttgcttttcataaatatgatctgagaaaagtgattaaaaaaaagacagtaaaagggaggtttagtccatctgtttagcttattatgtagaatgtcagcttaaattttacctgtacctcatattgaccgtatagcctggaaaatctttcggaggtatagttaatggatttaagcatatggcagtttatgtagttaatgaaagtgaaaacaaattgtattataaatacctcccaaactggtttattatcattctatcattcttcatgctctgttagtatgatattgaatatctgaggtaccaggattattgttgcttgtggctctgagcatttcgtagtgcttttgcatgatgagagaaagattacaaatttagtattatgttagatggtacgttttattaaaatcaaatgcttcaaaaataattgctctgtgtatggcatgagataaatagcaatcagatatattgtttaataatatgactctattaaatgatggcataaatttgaaaatttgaccttcggtatcttccgggtctaaaattatatgactccattataaatattttggaaatgattaactaaaaaattgtttcaattcttagttggtaaattcaatgtggtagtaggtggtggtgattattttgtattagagaattaggaattacacttagttctaaggtaatctttataggatgtccagcaattaaacccctacttttttgaattgcttaaaaataagggaactgatctttttaaattctgtacttgagttacgtctgtatatatagtcatgtcctagataatctaatggaacttaattagttggaaatctttatattgtttataactgaactagctataagaggaacattaaagaaaacatattttgagtggaggtaatgaaatttagcttctaatgctcagccttttatttctgtaatctataccagatacctaagaccctcttattgtttcccagcttcaacctgtcagtatagaaaacggtgtaacttactattttttctcaatattgaagcacatttgtagtgaaatattattttaactatatattgccatttttgctttttccctatttcagtaacatttttcgctatttcagtaacattacatgtcaacaagagaatggtgggtattttggggggggttgggtggggagaaattttactaagcttgctagattctaaaaggtataccttatttggccccttttccccatttaggggaacaagggtgttggggctgggaagtagataagaggtgagtaagtcatccaaagcatatgtcttcattagcctccctgtatgaaaagctgatttctgtagagtgttggaggcctactttcagaatctgtcatatgttaacattcatcttctctactgacctgatttatatcccttagtctatttcattttataattatgacaaaggataaagtcattagaacaaattctttttattagttgacgtattgttgtgtttatatctcttgtgtttgttattaagatggaagctcaatcatgtccttgtttaacagaaaggtgatgtcttggcattgataattctgattcaatatccataggtacatggtggattctttaaatatttagtattcttttatttctggaaagttttcttaaatgatagtttttttaaaatttcatttctataaagttttcttaaatcatactttttagtgttttattccattacttcatatttcttcttcaggaactcctgctatacatgtatgttggatcttcattacccagcttcaatatttttcacttttcatgcattctttttatttcttcatttctctttaaatttttttcttccttttcaccttctatttctcttttaacataattgtatttatttctgtattccacatagcttagtattcacttattttaaaattattttaaaacgttttttagatttaaaaattctttttttatttatatatacatattttatttttaccaaaggagcaacactattaactgaagacttctataatttttttcttttatttctgattctttcttcggttttccccctcagttttgaacttttctaattttgatttgtgatgtccttttgtattttagataattttcctaatgttttccagctcatttggaaaggctacagttttattctgtacctaagcaagtctttctggtgtcaaagatttgaccttgatacttttcttttgctcattttcgtatgagattagttttcctgtactttcaaaagaaggcgtggttcaagatggctttcccaatttcacatctgtctctaatgtttttgtgtaatgtctaaaatatggaaacttggtttatgagatctactctgccatttttatctgggctttctcttccttttgtctctgttgtacctgtcctgcttggttttgatttaaccccagtggtttctcctgaatgtggagccttctcctagaaggcagcctcggctagtcccagggttcagagtagccagctgctctcttcacctaagagaccactgtggattccttgtactcacttgctattggcttggacaaaagccctcccattttcagatgctattatcagattaatctctcattaatctgtctttccagtgtatgcctgtgggctatcttggggttctcttgttatcagacacctccctgctggcctctgctttctcccgtacagatgtcagtactgtgcaggtcttaattgctgttggtggtttgcccctacattcttacagttttagtttcccaaggatacctttaaacttggttttattgtaaatgtcgacaatggattttgggttttactatctagttctgtcttaattctggaattcagaaagattaaaagctctgttgttgcagctgctgccacctcttcccagtaccctctcctcctatgtcatttttttcttcttatttttcttgactgtataagagagaatgtatgacatttcctgcttgaccgctgagtttgattataaattaaaatacacaatattttatacaaattgttttgtagaagatttatttacagatgctcattcacaggtaaaattgacttatgaaaatagttttcatgacaaatgtatcaggctcggtaactaaatatatggattgatcttgtttataaatgaaattaaatgtgaatgtaacttacatatttctgtatttgcttacatccgtatgtacacatataatcagcaaatgagttgatgtttcctattcgtaacttaatggtaatagcttggtaacagagttgggagtattaaaaagatgtaaagagccccttaaaattttgttgctgggaattttagtgttctactgatgaaggaaatagacactggaaggcgttgtttctattaggtaacttagatatcatactgaagacttcaaatacttattgttgacactcaaaagacacacttagtgtaagtaagcatttccccgcttttcccaatgaaataagatcattattataattccattataaatgctgatgatcatatttatagaaatatagaagataagacttgaaatgatattcgctaccaattaatgagtttgaagaagaaatcaggatgtgttttgctattttacatttattcttatttaactccaaagaattcagtgatgttatgtactattatttccatttctctgtgaagacgttgaagcttaagtaacacgcataataaggtcatacatttagcaagtggctcaattaaagttcaaacctggttctgcctggtttcaaagtctgtgctactccatggtattaggctacaacatgacttagggtttcttcctctgctctattgctgttcagatgtactcctcttttggcagagtgggagaaaatttttgcaatctatgcatctgacaaaggcccaatatccagaatctacaaggaacctaaacaaatttacaagaaaaaaaaaaaaacattaaaaagtgggcaaaggacttgatcagacacatctcaaaagaagacatttatgtagccaacaaacatatgaagaaaagctcaacatcactgatcattagaaagatgcaaaatgccttttctgtatgccaccttatatccccagtatttattatttctaagtcatagtatcttacagtgtatataagtctcatccgttcttttgattttctcttccctgcttgcaattgggtacctaggaacaaagttgcaatcttagccagttttttctttagcctttgctgatgtgtgaaaagcccttttttctaccctggatttctgtacttaagctggaacagctaagtttttaccttttttaaatataaagtttcagagtcttctgccaaggatcttttgctgttttcctactgttaaatatttcaaagccttttttaaacatagggaatataatcaaacatagcaagcagctgatgaacaatatctagatagtcttcattattgaaatggaataaatggtatttttgtattttaggctaacagacaccttgtaccttagataaggccaaccttctcataaaatccctcagttacttttattaataataaccaaattaactctggattccagggtgtactcatgatggaatgatttctctgtcatgttatcctgaggatctagtactctgagataacataagtgtatgacactttaggcttatgaaacacttagctacttaaattatttaattttttttcatgtgcagatggtattgtacccaaacactacctttgtgtgtgtgtgtgtgtgtgcctgtgtgtgtgtttttgagacagggtcttactctgctcaggctggagtgcagtggcgtgattatagctcactacagccttgacctcctgggctccagtgatcctgccaaagtgttgggattgcaggcgtgagccacctcacccagccttaaattatttttttttcaaggatgtttaacctgagggttagaggctctttggcacgtgagctgctgaaatgtgtgtgaaagtgttgtgcacgtgtatgtttctctttttttctgggaagtggatctgtagtgattcttagatgagtctatgagacaagaaacttttatttttttcatttatttagcgaatgtttgttaagcgtactatgccttggccactctacagggtgctgattggaccagtctgtctacctaccgttgtagatgttagaagctatattcttttcacatgcctaatataactctttgtgtatgtatacatgcccaggcatgttccttcctcagaacattaaattcaccattttggtcaactcaaagcaagtacaccatgggacacagatctgaaataatgtccagatttttacttactgaatgaggtgtgttgagtgtataagactacatgatgagatggcaagtaattgcctgaagaaatgatgtagtgattttgtgtgtcttatatttatttactttttgatccagaaataaattatatagataccactattttgtttggatgggggagaaaggatgggtgtgtattcaggaacttatgttacttttttgcaactaataccccttctcagtagtacaaagatttgatttctttttctttctatttcctacagacttcatctgcagagagaaagagacgattacctgtgtggtttgccaaaggaagtgataccagcaagaaattaatggacaaaacgaaaaggggaggtctttttagttaagctggcaattaccagaacaattatgtttcttgctgtattataagaggatagctatattttatttctgaagagtaaggagtagtattttggcttaaaaatcattctaattacaaagttcactgtttattgaagaactggcatcttaaatcagccttccgcaattcatgtagtttctgggtcttctgggagcctacgtgagtacatcacctaacagaatattaaattagacttcctgtaagattgctttaagaaactgttactgtcctgttttctaatctctttattaaaacagtgtatttggaaaatgttatgtgctctgatttgatatagataacagattagtagttacatggtaattatgtgatataaaatattcatatattatcaaaattctgttttgtaaatgtaagaaagcatagttattttacaaattgtttttactgtcttttgaagaagttcttaaatacgttgttaaatggtattagttgaccagggcagtgaaaatgaaaccgcattttgggtgccattaaatagggaaaaaacatgtaaaaaatgtaaaatggagaccaattgcactaggcaagtgtatattttgtattttatatacaatttctattatttttcaagtaataaaacaatgtttttcatactgaatattatatatatattttttagctttcatttacttaattattttaagtacctttatttttccaggatgtcagaatttgattctaatctctcttatgtagcacatgtgacttaatttaaaacctatactgtgacacagagttgggtaaacgatgattatttaactttaagcagttcaccatccatttcaaagcctttgattggcttttttgtaaataaaaataacttgttaagaaacaaatatatctgtcatagaagaactagaaaatccagggaagtgagaaaaatgaaaataaaaatcattcatagttttactagtagctaatcacagtcaacctcttttgtgtatcccaccagacttttttatattcatttgtttttagttaaaatataaaagtctcgtatattcccatttttctgcattgcattaccagaaggtagtggcgcctattaaatatgtgatatgttgttgtccagccatggcttctgcatttgcatgcttttgtgtgtgcatctgcaataccctgtgaatatcctgtgtgatggagtggcaagtacgcacagacacgtctgctgcatgcctaggtacgaggctgtctccaggagaagcacttgtttgattatttgagttgccaattgaatttgctgctttttttcatggcttgccattttcactgaaaagaatgactaatgaaaaacgatgattggttattagatttggatgtttggcagacattttctcaaaattgaactaagttggcctcttcacggaaaacaactggtatttgttgtgccaatgataaaattggagatttctagcaaaatgtataattttggaaaagttgtgttcctccactggaagcttgacagctttccttaacataaagacttctctttctcttcgctttcactactactactactaattcttcttctgattcttcttcttctccttcttccttcttccttccttcctcctcctcctccttcttcttcctcttcctcttcttctttctctctttccttccttcccttcccttccccttccttccttccttccttccttcctccctccctccctccctccctccctccctcctttctttttctttctctttctttctttctttctctctctctctctctttctttctttttctttctctttttctttctttcaagcagtcctcccgcctcagtcccccaaaatagtgggattacaggtgtgagccaccatgcacagccttacataaagccttttctaatgagatggatagtaattaacaaatgtgagtttttgatattatataaagattttttctgtgtttcgaagatccgtataactcagtgaatcagtatgttctggatgactaatatgtgatgttaagaaatcatgactgaggccgggcgcggtggctcacgcctgtaatcccagcactttgggaggccgaggcgggcggatcacgagatcaggagatcgagaccaccctggccaacatggtgaaaccccgtctctactaaaaatacaaaaattagctgggtgtgttggtgcgtgcctataatcccagctactcgggaggctgaggcaggagaatcgcttgaactcaggaggcggagattgcagtgagctgagactgcgccactgcaccccagcctggcgacagagcaagactccgtctcaaaaataaaaaaagaaatcatgactgggtaaaagatctgttcagagtacaagatggaccaatggatttgatatatttgaatataacagagtatgaaaaagtttattgatatagtttcagattacacactgcaactaatctttaagaaactattacttgtccactttttggtaaaatttcagagaacaatgtccaccattatctgaacaggctattaaaatactcttctcttttccaactacgtgcctgtgcaaagtcagatttttttcatatacttcagccaaaacagcatatcaaaatggattgaatgcagaagtagatctgagaatacagccacttttgttaagccagacaatgagatttgcaaaatgtaaacaatgctgctgttctcagtttttaaaaatatgttttttaaaagtatttatgttaatgtgtacttggtttactactgctatttttaaataaaacaagaaacatttttaaatgtctgttttaatttctaaagtggtagtgatagatataacccatattaataaaagctctttggggtcctcagtgatttttttttaagagtatggaagggttctcagacctaagagattgagaaatgctgatgtaatgttttattataaaggtgtaccatgaattatgtaccttacttcatattgttggacattaaagttgctttcagtttttttgttttaaa

SEQ ID NO: 4 - DNA, 142390 bp, Homo sapiens
  gene (1)..(142390): c.3233+1G>TiExon26 skipping mutationj
gcaggaacgggggcggggacggcgctggaggggcgggtcgggtaggtctcccggagctgatgtgtactgtgtgcgccggggaggcgccggcttgtactcggcagcgcgggaataaagtttgctgatttggtgtctagcctggatgcctgggttgcaggccctgcttgtggtggcgctccacagtcatccggctgaagaagacctgttggactggatcttctcggggtaaagtgtcttcctattcccgttttcccagctccgtgccccggggtatctatagtgctaggcttctgagacacgtggaggcgcttaggcccgcggagcaggcccctgggctgtgtttgggagattctggaaaaacagactttctcccttttcctttcccctctggagcagctgggaaaggcgtctctcggagcttccgccattcagaaagtgtttccccgcccctgacggccccagcttgatgtttaccttgcgcgcttagttaggattgctctttctagtacggcctttattatggcagaaattgagccactacaggtctgcacagcaaagtcgagggaaataacctgctgtctatgatttagcaagtgatgatggatatttttgagttcaaatcactcagtctttaatggattttcttttctttttttcctagttgaatctcagttgttctcaggctaggtttgatatgaaaaatactactccctattgaagagggtaatataattcttaggatgctaatacaggagtctgtaagtcggagtacttcaggctttttatggttcggtacatttctttttaggggtgggatattgggataagtaggacagttcagatcttgatgtcattgaatagtggtgtctacctaaaaggaagaggctggggcacaaaattataatttaaagtgtttacttcagccaaaatgaggacagctgcccaggactcatttcccagttgccttggggagtgctccttcagccttggttacaagcaggtttttaaaggcgaaggggaagagtgggctgagacaaagttggtcaggaattgttattggtttacagagataccattgcttagtgattggctgtacactgtaactcatagggtatgagttatcgtgtccagcatatggcattttatggcttcttggttccagtctagagcccatatagcaggtgggctttaagagataattatccagctcagaccgggagtgagacgggactgttttttcattctaatgcctctctgggcctgataatttaaaggggcttgcattcttcagctaaaattttattttcttttattttttttcccccacagtggtctccctttattaatccaacaaatgtttattaaggactgctctaggcactagagataccaacaatgaacaaaacagacaaacatctctctccttttggagcttacattttagtggaaagagacaggcaaaaagtaaaattataggatgacagaaggtgaaaatagagattaaaaaggaaagggggatgaagagtgtgtgtgtgtgttgtgggtggggggctgtagggagctgcagttttacaataagtggtcagggacgtcctcgctgagaagggaatttttgagtccagagctcaaggaagtgagagaacttaccttgacgttctctggaggagaagaaagtacaaaggccctgggggaacctgcctctttatgttcagagagcaacttaagaggcctagtgagctggagcagagcggagaggaggtcagaggtcaggccagaaagggaaaggggccagaatgtgtaggactttatgggctatattgaaaattggggctttcattctgagggagatgggaagctgttggagagttgttagggaaacgtgatctgaattatgtttctaaaaaattggagtaagatatcataaaatttgccatcttagtcttttttgtatctggccaattccactcagaattcttttttaaacagctttattgagatataattaatatatcatatgattcactcatttaaagtgtgcaatacaatggtttttagtttgtcttcagagttgtacaacctttatcacaattacctttaggactttttcattacccaaaagagaatctccataaccattagtactcaatcccacccgctttcctagcaatcacttacctatttttttgtctctatatagctctcaaaccctatgatattccttctatctaactgtatttttgtactcattaacagcctctcttcattcccaccacccatccatcccagcctctggtaatcaccattctacttactacctcaatgacatcaaattttttagctcccacatataagtgagaacatgcgatatttgtctttccctgcctggtttatttcacttaacagaatgtcttccagttccattcatgttgctgcaaatgacaggatttcattctttattatggcttaatactattccattgtatatgtatatcacattttctttatccactcatctgttgatggacagttagcttgattccatattctggctattgttgaatagtgctgcaggaaacatggaagtgcagatagctctttgacatactgatttcatttcccttgaatatataccctgtagtggatttgctggacccgcttgtagttctacatttaatattttgagttatttccataatgttagtaataatttacattcccaccaacagcgaggaaggagttcccttttctccacatcctcgccaacacttatcttttgtctttttggtaatagccattctaacaggtgtgaggtgatatctcattgtgattttgatttacatttccctgatggttattgatgagcaatgtttcatatacttgttggttatttgtatatctccttttgagaaatgtctattcaggtcttttgctcattttttaaatatggttttttaatttttttatttttttgctattgagttgtttgacatccttaaacattttggaaattaacctcttattagatgtatagtttgcaaatattttatccgattctgtagattctgtcttcagtctgttgaatttgctgtgcagagaagcattttattttgatgtaatccctttgtctatttttgcttttgttacctttgcttttgaagtcatatccaaaaaatcattgcccagatcagcagtccccaacctttttggtaccaaggactggtttcatcgaagacaatttttccatccacaggagggaggggatggtttcaggatatttcaagcgcattacatttattgtgcactttgtttctattattattacattgtaatatatagtgaaataattatacaattcaccataatgtagaatcactgggagccctgagcttgttttcctgaaacttgagggtcctatctgggagtgatgggagacagtgacagttcataaggcattaggttcttctaaggagcatacaacctagatcccttgcatgcgcaattcacagtaggttttgcgctgctatgagaatctaatgccaccgttgatgtgtcaggaggtggagctcaggtggtaacgtgaggaatggggagcagctgtaaagaaaaatgaagcttcgcttgcttgcctgctgctcacctactgctttgtggcctggttcctaacaggccatggactggtactaatctgtggccctggggttgggaacctctagccctgaccaatgttagggagcttttttcctgtgttttcttcaagtggtttcatggtttggggtcttacatttaagtctttagtccattttgagttgatgctgtatgtggtgagagataattgactactttcattcttttgcatatggttatcagttttcccaacaccgtttattgaagagcctgacctttccccattgtgggttcttggctcttttgtcaaaaatcagttggctataaatatgtggttttatttcttgggtctctgttctgttctattatctgtgtgtctctttatgccagtaccgtgctgttttaattactagagtttagtatattttgaagtcaggtagtgtgatgcccctagctttgttcttttagctcaacattgctttggctattcagagtcttttgtgaggataatgttttcaaggttcacccatgttgtggcatgtatcagaactcgatttctttttatggctgaataatattccatttgtttatattatatatatgccatatttatttattcatatgttgatggacacttaggttgtttccaccttttggctattgtgaataatgctgttattaacattggtgtacaagaatctgtttgagttcctattttcaattcttttgggaatatacctacgtgtggacttactagatcacatggtaagcttttagtttagctttttaaggaactgctaaaactgtttttccatgggagcagtgtacaagtgttccagttctccatatgctcaccaaaacttaatttccttttttaaaaattatagctatcctagtaggtggtgggaagtggtatcttactgtggttttattttgtatttctttaatgactaatgatgttgagcatcttttaatgtgcttattggccattatatgtcttctttgggaactgtctattaagtcctttgcccattttttaattgagtttttttttctgttgaattgtgggagatctttatatattctgaatattaaacccttattgggtgtatgatttgcaaataatttctcccattttgtgggttttcttcactttttgatattgttctttgattcacttttaaatttttatagagtccagtttatctgttttttcttttattacctatgcttttggcatcatacctaattcccaaatccaatgccatgaagattttctgttatgttttcttttaatagttttatagttttactttttctattggagttttaagtaaattcttgtatattagtgtgatacattttaagttatttttgtatatggtgtgaggtaggggtccaacttcactcttttccatatggagatccagttgtcccagcaccacatgtttaagagtctattctttccccactgaatggacttggcacccttgtcaaaaatcaattggtggtaaatgtatggatttactcctggaatctcaattctattctattgtatttatatttctgtccttatgcctgtaccacactgttttgattacagtagctttgtagtaagtttagaaattgggaaacatgagtcctccaactttgttcttcttttcaagattattttggctatttggggtcccttgcaattctgatgagtttgaggatcaccttttccatttctgcagaaaagccttttgatagggattgcattgaatctgtagataactttgggtagtattgacatcttaacaatattaagtctttctatgcataaacatgggatatctttccatttatttgtgttttctttaatttctttcagcagcattctgtagttttcagagtacacgtttttcacctccttggttaaatttattccttggtattttattcttttagctgctattgtaaatgcagttactttcttagtttcctttcagattgttcatttctggtgtataacaacagctgatatttcaacgttgatgttgtactctgaaactttgttgaatttacttattagatctagtagctttctttgagatttttatatgggattatgtcatctgtatatagagatagttttacttcttcctttccattatggatgccttttatttcttttccatgtctaatttctctggctagaactttcaatatgatgttgaaaagcagtggtgaaagtgggtatctttgtcttgcttcctatcttaggtggaaagctttcagtctttcaccattaagtatggtgttagctgtgggttttcataaatgccctttatcatgttgaggaaatacccttttattcctagttttctgagtttttatcatgaaagggtgttggattttgtcaaatgccttttctgtgtcaattgaaatgatcatgtatttttcctcccttatcttaatgtaatgtgttatattgattaattttcttatgttgaaccacccttgcctttctggggtaaatttcagtcacttatgttatatagtcctttaaattgtgttatcttataacagaatcactctgctactgttttgagcataggccatagggaaaagcaggtaaaaggtaatatggcttgaaccaacattgtagcagcggaagtggtgagaggaggtcgaattttggctttgttttgaagatagaaccaacagtatttgctgacagattagatgcagaatgtgaaaggaggagatgagtcaggatgaatccaaggcttttggcatgagcaaccagaaagatgaaggtgacttactaagatgggaaatatacaaaaggagcagtttggggaaactttatatctattgagtggaatatgccaattagagattcaaatatccagtaaataattggctatcaaagtttgaagttaagaggaatggtctaggctgtttatataactttggaagtcattagtgtataacagctaatttaaaagccagcagactctaagggagtgagtgtagagggagaagagtagaggtctgtgacttgaatcctggaatgctgtgatgtttagagattggggaggtaagaaggagcagcagagtatactgaaaagggattgttatactgaaaagggattgatatagatggagactcaagaattatcacagaaacctgataaaatgtttcaagaagatgggtgtgattaattgtgtcacttactgccggtacattgactcagatgagcgttgagaattggctataggatttgacaacataaaagtcattggaaaccttgacatgagcccttttcgtggagtggagtggttacagtgggtttaagagaggattaaaggagtggaaacagagatgctattatagatgactcgtttgagtagttttcctacaaaggggagaataataatggagcagttagccaaaagttgagtttttttttcttcttcttttttttagttggaaaaaattgcgtatatgttgatgggtcttttctggcagaccagtagagaggaaaaagttgatgatgtaggagatgggaaaatgtctttgagtagatgtcttcgagaaaatgtctttgagtagatgagaggtttgcacacatggagaggttggatgtaggagtactgatagttcatccatagttacataagaaaaggtagatgtattagagttctcctgagaaacagaaccaatgggagatctttatatctctgtgtccatctctatctgtatttctgtctctgtatctatgaagagattataaaagttttaagatctgccaggagacatacccacgggagctaatggtatagttccaggccagttgtgaaggcctgagaaccaggagagcctatggtgtaagttccagtctgagtccaagtctgaaggcaggagaagaccaatgtcccagctcaaagacaggcagagggagcagatcttcccttacttagcctttttatttattcaggccttcaacaaattgaaggcccacccacattagggagggcaatctgctttactcagtctactgaatcaaatgttagtctcacccagaaacatcctcacagacacacccagaataatggttagccaaatatctgggcaccccatggcccactcaaattgacacataaaattaaccaccacagtagagtatatgggtacaaatataattatgtgatatagatttcagggtaagagcctgtggaaattcatttttgattgcttctagtgaaatcggaagcaagatcatcagctaagagtgacgatcggtggaggagatatgaagtttaagtggagaggagaaggtataaaatagtcttaggaggggaggatagtaaatagattagggaaaagttgtaggattgccaggaagtagtaagggcccacttgaggctggtggtcacaaatttaaggtgagaccagtcaaaatggttgtgcttttcacctgctgcattcattcagctgcataggtacaggcacagagtaggtcaagagttcttttttattcggggttagagttttgccaggagatagtaataaagccagaagggcaatgaatttgagggagtatgcaaggaagtggctgttaacttggagtttaaactagtcaagaagagaattaaggactgcccaaggggtgaggacaatgatatggtagcagggcccttaaaagccccagttagatgaaaagattgttggaattgagtttctagagggaatgaacttgaaaaacaggaggtgttggttggagagtgggatatatggaattgagattatggaaggattcagtcgttggtaataacatagtatctttgtaggaataaataggtggagcaggatgcagacaagatcactggaggagggctggtcagaagactgggaggcactatctcccttggatattatacatcaaagcttgtgatctactagacaagtagtggggaaagggtaggatatagatattaatggctatagttttgatggtgatggtcatggtgatgatgatggtccattaacactcaactcaaataccatcaatttgatttatatctaacaccacaaagttaggtgttgagttacatgtggttatattgtaactaatagtcagcccttcatggacttctattctttgatgagactcttcttgtaggagtagtaggtgccttaaagcaccttttcatagttgtcagattgaaatccttcaccagtgttttaggttaaccctgttactgtggaagtttctcttggctttctgtgtgggctgcttctttgtctagttttaccttttggggttagcatactattgtgaataatttattggtgagaaggtaagcagagaagtagagtactctatgacctagtaatttcatatctaggaatctatcctatagaaatgataggaatgccttacaatacccacatatccacaagggtattcattgaacgttatttttggtgaaattcgcaagcaacctaattatcatcaatagggaattgttaaattatgatagataaaatggaattctattcagtcttcaaaaagtcagatcaagaagtggtcttacattttaattatcccatcctgtcaacaagagtgtcttcagttgcaagtaatggaaaaaccattcaaactgacttcagcaataaaaggttatttattggtctgtttcatggagacatctgaggtagagtggccttcaggcaagttcactcagggatccgactatttttctggccttattcttggccctcttctatgaaaacaccttcagggtggtttcttgtatgcttgtaagatggctacttgcatcaaccatgaccacatctagcaggagcaaaagcatcctttcccgtaccagaggagagtcccgaaatttgttgcaattggactgccttggaagcaataattatggccaggagatggaggctagagaactgagacctgatcatagctcctatccttgaatcagttgtatagcaaggggaattggattttccttaagacagttggatttcacctgtagtcttggtgatgaggtcagttccatccataaaactttgctgttacacattttgggatggggtgaggagggctgaatggagattaggatgctattgaaatttgctgtacacaatggatcattatcgtcttctttcttagtgttaaggtaatcagcctctttttcctcctcctatgcttgactttactaaaaccatgagacatgtttaacctcaggactccaatttgaaaaaatatagactgttatttactttattacttacagaagcccttcatactactctcagcaagaaagaggtaggcagggagtgagggaggggggatcatgcttactgagaaacaaactatcgagtattgaaactcccccttcatatgcctgacctcagtcccattcagttaccagtaggggcccctattaattggtacctcaccagcttttgctgttcgttcataaaactgagtcattgaagtacagtagaaaaataattggactacaagataacttatttccttccataattgcaaaatatctgatttttcttcttgtttgtattatgtaaacttaccctgtctgagggtcctcctggattgttctttgcatttatatatacatagaatttcattttcttttttcttgttttttttttagacggagtctcactctgtcgcccaggctggagtgcagtggcacaatctcggctcactgcaagctccgcctcccaggttcacgccattctcctgcctcagcctccccagcagctgggactacaggtgcacgccgccacacccggctaattttttgtgtttttagtagagacggggtttcaccatgatagccaggatggtctcaatctcctgaccttgttatctgcccgccttggcttcccaaagtgctaggattacaggcgtgagccgcttgcccgaccttcttttttttttttttttttttttttgagacgttgagatagagtctcactctgttgcccaggctggagtgcaatggcacgttttcagctcactgcaacctccacctcccaggttcaagcgattctcctgcctcagcctcctgagtagctgggattacaggcgcccgccaccatgctctgctaatttttgtatttttattagagatggggttttaccatggtggtcaggctggtctcgaactcttgactacgtgatccgcctgcctcggcctcccaaagttctgggattataggcgtgagccactgtgcccggccaatttcattttctattttgaaatttaaactaccactgacacttcgttttccctctgttttacttagcatttatcttagagaataatcttaatatgtatagttctattttattcttttactggcagcttagtatgccatattttggatgtgtcattgtttatttacctattaatttaccctataactgcttcccatatttttgcttttacaaagggatgtaatgaacatcctttacatacgtctttgtgcatatgtgcaaatatttccataggatagatgtaattactgacttgaaggttatgcagatttaaaattttgatgccttctatgaaacatctttcaaaatggtgatgccagtttcttctctcgtaattactgcatatggtcaatcttttaaatttttgctggtaatgatatttcaaaattataaccagttttttggcctcatttcttgaataacttgttttttctcaaagataagaaatgtctccttcatcgtatgtcaaatttccatatttacatggatctatttctggacatggcaagttttatttatttattgtatgtatttacggtgtacaacatgatgttttgatacacatatacgtagtgaaatgattcctacagtcaaacaaattaacatgttcaccaccttccatagtctctgcagtcttcaaggttttctctatatgggattagacatgctatgtctgatctgtttttgtatttttacaccaattccacactaattttttttttttttttgactgggagtctcgttcttattgcccaggctggagtgcaatggcatgatctctgctcactgcaacctccgcctcccaggttcaagcaattctcctgcctcagcctccctagtagatgggattacagcactcgctgccacacctggctaatttttgtatttttagtagagatggggtttcaccatgttggccaggctggtctcgaactcctgacctcaggtgatctgcccgcctcggcctccgaaagtgctgggattacaggtgtgagccacctcacctggcacacactattttaattactgtagttttaaaagtttcatatttagtagggtgagtttttccttgttggtcttgtttttcaaaaaaaatttgctgctcttgagtattttctcttcccagtgaactttaatgtaaactcacgtggttcaatgaaaaattctgatgactttttttcttggtattgcttcttgagtgtattgatttaattaatatatttacagttttgggtctggctgtgccgaaacgcagtgtgtcttatccagtccttttttaactgtcttaataaaatttgctggttatctttaaaatggatcttgtatattttatgttaggtttattcccaggcaggttgtcatttttgctgttactgattttggatataaattttggatataattgtataatttggacttggatataattgtatttgattctgtcttatatataaaaatgagataggataataatttatcctaggataaaaataatttgagtatccttattttgcatctggtaccttacttgctcctgttaaacaaatagataaaattacttgtcttcaaagagatcctgtggaaaaattatttattttaggagactttggagctttgataaaaattaggcttatcttttgtaaaagctggttagtgatagcaatcagactcttttaaaggtgatttttttttctttcctttgataaaatgcttaatatgagggaggattaagaaagaggatggcttttgaacagtttcttcatggggaaataagaaattagaataatttcatgttctccaaaaaaaggagaaaaatgaccttccctcctgagcctacttcaagcctctgtttctttctgactctattgttctcatctctgcatttttccaatctcttctactgttagtgttttaggctagctcctcagtggagggcagaaattcaccttctctttagctgtctttgaaaccaagaagatagaggtatgagatcttcgtagtctgtagtaagaataatagaagccatcagaaaaaaatatcaaagctttgtagctgctcctggaagttttgatgtgaagcaggagacatcacctattggtacctgacttgcttttgctgttcattcataaaacagagtctctgaaatacagtagaaaaataattagactggaggataacttttttccttccaggaattacacaatcacaaaattgctgatttttcttcttattcatgttacataaacttatcctgtccgaaaagactgtatttgaacttactatgtaagatttgctttaggtaaatttatggctgcttccagaattgtgtattaattttccagtttcttttttaccagtctccacttttacctttccctcttccccctatacttaaattggtcttactgtaaaatttatgcgtttctctttctacctggcaatgctgattttttttttttttttttttttgaggcaaggtctcactctttcacccaggctatagtgcagtggcaagatcgtggctcactgcaacctcgaatccctgggctcaagcgatcctcccacctcagtctcccaagtagctgggactacagatgtgtgccatcgcacctggctcatttttgtattttttgtagagatagtattcgccatgttgcctaggctggactcaagccagcctcctgccttagcctcccaaagtgctgggattgctggcacgtaccactacatccagccagggctgagtttctgaatcatcattgcagcaagagaaattggattacctttagaccactggctctactgtgggctgggagtgggacaccttccttaaagcgcattggacattggctttgtgggtaactgatctttacctgaatgaaatttatcagtactgtattaagggtctagggtggaacggatgctagcaaggcaaccgttaacatccacttactgatgaatcctataaaattttatttcaggccatacgaagtaacagtaataaatataaaaggaaaaatagacaacctaagcaactttttaaattgacttacttgaaaactttccctgcaatttcccggtttataatggttgatttcagctgactggctatagctacttagagaacagaggaaattcattaaaaataatgaattattcagttgggtagtgaaatccagttataaagcacttcgctgtgccatggattcagttcaggtcaagtgatgttcctggtttatgggcagtgtggcttctcactatgacacagcaaagaacgtagcttttatcctttacccttgttactaactaaaattaatggcattttattgtgtttatttgtttgattccatttacagtttatttcacttggttttattagtacaaaattgtgctttatataatatttgacagttaggaaaaattgttagatacctataaagaaacaagtctctcaaaaatcatcctactacttttaaaaattacatcgtcttactacagttaacctagatgtgaatgggtagttttatttagcttttctggtttgtttgcttggtctgtttggagggaagttaagattagcagaaatgtagtaatagattcatgaaagtcttgaaagcttctttaattagagaatttaatgagggctttggcatgcattctttggtttttctctgttttcctctaccccttcttattctttttggttcattgaaaagtagaaagaaattctcaaaaaccgtacaggagaataccttataaatgatatcttctgcaataaactatagattgtatatatgtatatgtatctagatacacaatctgtgtgtgtgtatatatatgcttgtgtgtgtataaatgtataaattagttactagtatatacgtaagtataaaacctcaatgtgcaaggttacattttcagaaaatatgtaatataataaaagaaatcaagcccagaatttttaaaaagtttattgcgctttctgttaaaaatgaaaggctttttgactggaagctgcttctcagtaaaaataacataattgtgttggtgaagcccaaagattctaatgaaaattagggtattgacaaccaaacggaattgctggagtacttaagctgctttggttttgtaatctttctgtgtcagaatatttgaaaaacacttattaatccagtcttgtaacttatccttgaaatctcttttttaatattcttttccacacacatgaaaagttagatgagtgtatgaatttctgttgtcagactagttgtaaacctcctaaatatagtttctgcagtatagttaaagagaaagaacatcctggctaacacggtgaaaccctgtctctactaaaaaaaaaatacagaaaatgagccgggcatggtggtgggtgcctgtagtcccagctactccggaggctgaggcaggagaatggcgtgaactcaggaggcagagcttgcagtgagccgagatcacgccattgcactccagcctgggcgacagtgcgagactctgtctcaaaaaaaaaaaaaaaaaaaaaaaaaaagaaagaaaataggcccagcaaggtagctcacgcctgtaatctcagcacattgggaggctgaggtagggaggattgcttgaggccaggagttcaagaccagcctgggcaacatggtgaaactccatttctacaaaaaatacaaaaattagctgggcatggtggcatgtgcctgtagtcccagctacttgggaggctgagtgggaggattgcttaagcctggggaggttgaggctgcagtgagctgtgactgagcaacagagctagactctgtctcaaaaaaaaaaaaaaaagagatgggttttgaaattcagtactttttttgagtgaggtccaatgggtcagaaagaagcattggataaatgaatccattttctcttctctgtttgaatttgtaatttgaaagaatattctacctataaagtacttcagtgcttaattagctgtcagtgaatttatatatcttatctaattcatatggatttgctatttttatctgtacctacagattcctgacctctctaaggggatcccagtatactatagggaatgaggtataatagaagtaaaagacctatcactagtcctgtcatcattccaactcatgtgtaattatagtttaaaagaagtgacatcatgtgtattgctgtttatctttacattaatcttgtggtcaagaaagcaaatactataatatataataattatataatatcataagacaagtaatataataatgggaatataatcccattttacaaatgaggaaatgaaaatttagagaaataaagtgacttgtccagggtcacatggatactaagtgaccaagtgtcaaagcagaattttccaaataacttaaagataattcttgtacaaatatagaacgaacacatgtcatatgtgttgtgttaatgagggaaccagaaggatgacaacattggttcagagagatgcaaagataaatatagacattggaggaaaaagttggaaataagattgttaggttagatacaaagctgtgttataggccaataaaaaccatagactttgaggttatcttttttactggacaggattcagttacacctttatgagaccaaaatttattatttaacatgtggatattagagtctgagttttaaaattattagtaaatgaccgtcaaataaagatatgtcccctaatgaaatactgataatcgctgggtgagcttgtgctcctatatgacattgaaatgacatactgccctctctttgtcttctaagttttggatacttttttttttttttttttgacacaaagctgcattagaacctaggtttcttgattttcagtccagatttctttccactctacttcctgcttcttcatagtataattttcaacactagagcagtctgcataacttttgcaaaatcagctagtctttcttattagttttcctttgtgcaaagtgatgtagatacagctttcttcttcagagaaacattgtgaaattcaatgaatatttgtaaaatttgcatacgtgcccaatgtgagaaattgaaattattacttaagtattgcaactgttcttttaggatattttgtttgcaaatttcagagtaattataaatattcttgcatttttattgtaatcagtatttataaaacagtgtatttcatcacattaacctttacatattttgaataaaatagtattgaaccattttaaatagtaagtggaaatttttccacattaaacagtataacgggctaacagagttaagcattgcattatttaactaataattttttcctgaacttcagattattatctgtatgtgtcatataacttgacaattttttttttttagtgctttttaaaaagagtgggatactttattcagtttagccctcaagcaattaggcaagtcagttaccatggtaacagtaggtattaatttccttacctagttagaggttttatgaacaaagaaatctctgagttcatccaccaaaacccaactttctcttgagactggcctcttgagactggtgttaaatttgtctattttctagaagatgacactattctaagtggaaaatacggttctcttgaggtgaatttctactctatcaagagtgaagtagagtatggcttaaaagttaagtgattaaaaagctaccctttcttagctaatttggaatgtaattggtcttaatttttctaaattcgttctaaccaaaatcttattggcgtgatttctattgacatgaactagaagtgacttcagcagacaacttgtcccaatatctaaatgctgtcaaatagaatcacttaagatgaatttcttccaaaacagagttcacaattttgacagataatctcttagcatttaattgactagtattaccaaccttatggaataggtccactcgtttagctatcatgaggaccattttgcaactaacttatcaaaaagccttcaccaagaagttgcatatcttattgatattttagaatgcgattatggagattaaaaatcaccacaatgggttgttaataacgccagccttgaactttcagttttagagcattttatctgtgttctgtagtcaaagttggtaaggtgtccagtgggtcatgtttgacttgctgcttgtttttgtactgtgtgctaaatggtttctacatttttcagtggttgaaaagtcaaaagaagaataatattttatgaaatttaaataaatccaggtttcagtgtctataggtaaaatttcattgtaacgttgttatgcttaagtattgtttatgacttctttgctatagtgacaaacttgagtagttttgacaaagatcatctggcctgtaaggcctagaatagttactgtctaaccctttagagaaaaaaattgctggcccttgttctatagtatgaaaaaatatagccttgattattcattaaaaaattattttcccattttattgacatacttttgtcccctgattgttaaaaggaatgcatgttcttatagaaaagttggaatatatagaaaagtataaagaacaatatgaaaaaccatttgcaattgtgagataaccactaatgttttggtatacattgctccagacttacacacaaacacacacgcgtatttattttatacaattagagtctaattttttttttgagacagtcttgctctgttgcccagggtggagtgcagtggcaagatttcagctcactgcaacctctgcctcctgggctcaagtgattcttgtgcctcagcctcttgagtaactgggattacaggcgtgcaccaccatgtccagctaatttttgtatttttagtagagacggggtttcgccatatgcccaggctggtctcgaacccctggcctcaaatcatcggcctgccttggcctcccaaagtactgggattacacacgtgagccactgcgccttaattttttaatttgcttttttcacttgaataattataagaacattatttttaatgactgtgtagtgttctgttttatggatgtaccatacttaattatttagtcataatttattattatgaggttgataaacatgataatcagattgagctcaagaagctagttatagggttgcacaattaatgaatcccaggtacctcgctgggttgctgaggctgctatttttttcctgcctgtttggaacactgtgtttgggaccaatgaggcaaaagaaattgaagagctgccattttcaattattctattagaagatacattgaagatttgtcaaatgacatagacacaacactaatccagaagattatttaatcaaaaaggcattcatttcagatatgaattcataaacatttgtaacgatcctcagtttgaagaccatatagaatccctgaagaactggaagacactatttgcttggcaaagagaagtccccagaccaactggggatgaaatattcaaagagataaatgaatactttgaaacatacaaggtactatggaaaaagagtggaagtttgggacaggtaatgacaggaagatataaaagctttacattaagttcaatctaaaactttattccaagtaacaggttgtcttattcatggagaagcagttgtaaattaaaacttgcctgtggtttggaatttcacattaaatgattacattaaaaattcaaatggtgaacctaactaaatccaagctcctacagtaccttcttttcacctttaggtgaagaaatgcggtgagctattttattactgattatgtggacagtccaaaggaaggttcataagcgaaaaggaaaaatttaaattattccatgtgagcgattcttactttgcagatttgttgaagtgtagttactggcttcaaaaagtggtatccttaactgacattttgaacacttgaattcactcaataaaaaaatgcagtgatcatgtggaaaatacattaaggtatatgacagagtttatggattcagagcaaaaattcagctttggaaaagtgaagttaaaatggttttttaagtgatgtttaattggtgttatttgaatcctaaagaagaattaatagtactagtagaggaaagtcagtgtgtctgtgacaaagctttagtattattttgaaatacttgatataaaaaagttcacgtttactcaaagcttacttaaatcatcagaataaattaacatgtttcttaattaaagaaaaggagaagctattagacttaaaaaatttttgcacccttgaaatacatacaatttgaagagattaagttgttggaatactggttaatggtgaaaaaggagttttcagtctatgaaagcaaagccttctcctttgccatttgcttttttgtagtggttgctatgtagaattcgaagaaaatattgttaaaaagtcttggtcaggagtagagtgtagcatgaacccaatgcattttaacgttaataatgaggaaaaagggaatgcatgataatttcatcaagtcagaaaaaaatggaaaaagaaaaagaggaaactgaagaaagtaactgatgaaagtaaggtgaaagggaaaacaactttttataccacctgtgaatgagattaattttcgtttccatactgaaagacaaatatattccaattaagccattcaaaataaaaaacaatttttttttggtaagagatgggatctcactatgttgaccaagttagtcttgaactcctgccctcaatcagtcctcctgcttcagcctcccaaagtgctaggatttcaggcatgagccactgtgcctggccaaaaccaaaattaagcaacaaaacaacaacaacaaaaattccagacagcctttaaaataatgataaaggttgaaaaattgtagatagtggtaggtagataagatttcaggaaaagtccaaagcaaatcataatacgttattttaaaggggggtttaaaatcctttaaaggtacaatgtgaagcattatgaaatgataaaatacatgttttttaaaaacattaattttattttaagttccaggatacatgtgcaggacgtgcaggtttgctacataggtaaatgtgtgccatggtggtttgctgcacctatcaatctgtcacctacatattaagccccgcatacattagctgtttttcctgatgctgtccctcctccaggacccagtgtgtgttgttccccatgtattctcatcgttcggctcccacttataagtgagaacatgtggtatttggttttctgttcctttgttagtttgctgaggataatggattccagttccatccatgtccctgcaaagtacatgatcgtgttcctttttatggctgcatagtattccattttatatgtaccacattttctttatctagtctatcattgatgggcatttggtttttttccatgtctttgctattgtgaatagtgctgcagtgaacatgaacatgtgtgtgcttgtatctttataataaaatgatttatattcctttgggtatatacccagtaatataattgtataacccagtaataggattgcagtgtcaaatggtatttctggttctaggtctttgaggaatcgccacactgtcttccacaatggttgaactagtttacattcccaccaacagtgtaaaagcattcctatttctccatagccttgccagcacctgttgtttcttgattttttaataaacgccattctgactggcatgagagggtatatcattgtggttttgatttgtatacaaaaaagatttgtatttctctactgatcagtgatgttgagctttttttcatgtttgatggttgcataaatgtctttttttgagaagtgtctgttcatgtcctctgcctactttttaatgggattgtttgttttttttttcttgtaaatttgtttgagttccttgtagattctggatatagacctttgtcagctggatagattgcaaaaattttctcccattctgtaggttgtctgttcactctgatttgctgtgcagaagctaaaagacatgattttagaaaaagacatgtcaaagtcatacatgctcaacgacatagcgagtacatatgtaaataaaaaattattttatgctgtgaatttgaccgaaaataacctttacctcgtcaggaattacaatcctcacgtatggtaaaggatttccctattgcaaattattccacaacattaatgttctgtgtgctttttatctatcccaagatacaagtaaatttgacaaagatattaggtttgtaaacaaatttacgttcaaatctttgcctggaagtatctagatagaattttgcatgcaaaagagtatttacatctaaaaaattacatatttcaaattaaaatgattttagtgttatagatagaaggaaagagttattgaagtttatttctgttttggcagtgtaaatgaattacttacaaaattttagaagtctacaggtgtttttataaagtttgtgttatttgtggaaacctcagttttctggcattttgccaatgaggtctactctaagtatagcagaaatttgttttccagctttataaatatatattttaagattaagaactgattttacttatataatctgggatcaacttttggcttctcctgtcaaggattttgaatttgtgacaaaatatacacttattgataaccagtgacatatataaaatgctttacaattaataaagcatatgtattttacatattttttcactacatatgacgcatgtggcaaccccaagagttgagttgtacccatcggcaaactttgatcatgattctgtgaatataggcaagcaccaattgcaggtagaacattctttttttgagtcccaaaccgtgagaaacaaattacagaaatgtacctttcttttgcattaggacacgttgtagttttgtatgaacactctagttttaagcagtatgtgcaaaaacattgcacaaaggatttgtgtgttgattttgggactcctgtattattaattatgtggtttatttgactaccccacattttcaagcataaattaataaatccataattccaggcttattaacaataaacaatctagatagttgaactctttcttgctaacattttctagatatggactgtttggtatttttctactaataaagacccttagtaagctgccttctggtttgatgtcattgggatgtttactgggaactttggtggagatcttgcagtctctctcccccagtggtgaaagaatgagttacaaaccagctttccttcccagtgtacaatagcgatggagtttgttctatatggaaaatttgtttgataaaagtattctttaaaattttttgttccataaattatcagtattttcagtttctgattcatgcttgggatagttgctgcatattgtttaattttgtcagaatttatattgttaaatatcaaatacgacagactaccctcaaatcataagtagttaatgtaattaacatcctgtttcatcatgagactcttcagtgttacattaaaaactgctacctcctgggccgggcgtggtggctcatgcctgtaatcccagcactttgggaggctgaggtgggcgatcggatcacgaggtcaggagattgagaccatcctggctaacatggtgaaaccccgtcgctactaaaacatgcaaaaaattagccgggcttggtggcgggcgcctgtagtcccagctactcaggaggctgaggcaggagaatggcatgaacccaggaggcagatcttgcagagagctgagatcgtgccactgcactccagcctgggcgacacagcaagactccgtctcaaaacaaaaaacaaaaaacaaaaaaactgctacctccttattacaaataggaactaaagttgaagtttgaggaatttgctaagaactaagccttgaactaaggctattttatttgagtatgagtcatatcagggtacggatccattttactattaacaaaacaaatatgttctgttttttttttttaaatgcacacaccacgtttgagagattcttattcactgtattttctttaattatacttgaattttggtttacattgaggagtgccctcaaagatattaacagatttttaaaaaatcctctaaaaaactcattcttagggaaatttgttcacttactaggtgaggagcaaaataaaaatccttaatatagaagagctattatctgtcttcaaaattaagtctttgagtagatttgtgaataaatctaatagttttgctgaatttacttagatcttaagacagaataatcatgtagaaaatttaaaatgtcaggaattcataatgattcatatacccaaggattttcattgatagtgaggtaaggttattcttgagaaagactcaaagtcataaaataatagaatttcgaaactaccagaattatacaagtcaattaaaatgactgatttgttttaagaggaagaaatactaaatgtataattattagatgcagcatattgtatctgttttgttttgtgattctagctcttataacctatgcttggacctaggtgtcataacttactttaaatatgtatgtttggttttcattcatattgacagtactacctctcagttttctttcagatattgttttgtatttacccatgaagacattgttttttggactctgcaaataggacatttcaaagatgagtgaaaaaaaattggaaacaactgcacagcagcggaaatgtcctgaatggatgaatgtgcagaataaaagatgtgctgtagaagaaagaaaggtatgttgttcattgactattcttttgggtgagaaatttaatttatatttgactgtgcaaagagtcagttgttacttgtaaacttcaagtcattgtttaggtcagagttgctgttgtctaaatgcaccaggacctagttgttgaaagggtaaactggaataaactttaattgggtttacaaaatgagaattcttactgtatattttctctttttcgggttgactttaccagtttgttctagttcagataatttagacaacattaactttgttgaattttttgtttgccagccggtcttcagcattttaaggcaacattattattacagttgtaatacgaatataattaccagagaaaaaactcaggaaaataaatgcttttatgaaaatgggattagaggtttgaaaataaacttgttaggagaaataatttcacaatgggatggttttttctttgttaagttttctttatgacttcattagtttataaaacattaattgataaaacttagaactataaattgaatgcttcagtgaactttattatttcagtgaacatttgttatttgatgtgaactttgtgcctgttttgaaatttactaaactcaaggcatgtgttcggaagagtgtttttgaagatgacctccccttcttagaattcactggatccattgtgtatagttacgatgctagtgattgctctttcctgtcagaagatattaggtaagtgatttgaatttcctgattttatttgaatttggacccttagaaggtactattatggtaatgtttgtgaatatactgagttttacaggtgaggtgtgttcaatagataattatttctatgtatacactatcaccaagttttacatttcaaataaaagtcactgaattaatttgtaatctgtcagtttgttcattcataagcttttctattacttcagacagtttttttttaacttttttaatatatgtgctgctgaagcgagcacgacagttttttaactttcagtacttaagatgttatatatagagctactgaacatactgtgtttattttaccaatttagggaaaaagtgcaaaaattatttaacctttaaatgcacctttatatttcattaaaaatatcaacatagtaatattgaataatggctatgatcggctctgttgtgtgtaattagtaacagttgtagcaaatgatccttaaaaaatgttctaactaaacattagaggccaggcgcggtggctcaggcctgtaatcccagcactttgtgaggccgaggcaggtggatcacaaggtcaggagattgagaccatcccggctaacatggtgaaacaccgtctctactaaaaatacaaaaaattagccaggtgtggtggcgtgcgcctgtagtctcagctactcaggaggctgaagcaggagaatcgcttgaacctgggaggcagaggttgcggtgagccaagattgcatcactgcactccagcctgggcgacagagtgaggctccgtctcaaaaaaaaaaaatccaaaaaaacaaccccacaaacaaacaaaaaacattagaaatgtctgttagtacttttaaaggttgccttgtaaaattaggactgcaatagtgcaatctaaggctctcaaagcataaaacaagtaataaggaattcattcagatattttccgaggtggttatacctgtcttttaaaaaaaaaattttgttatatattgggttaaaaaaagcagaggtgctgggcacagtggctcatgcctataacccctacactttgggaggccaaggcaggaggattgcttgagcccaggagtttgagaccagccatagtaagacccccatctctacaaaaaaatttaaaaattagccaggtgtctgtggtcccagctactcaggaggcctaggttttgggcccgagaggttgaggctgcagtgagccttgatcacaccattgcactccagcctgggcaacagggcaaaaccctgtctcaaacagacaaacaaacaaacaaaaggcagaggtaggttaagctatttattaatggtcttctactggtatagatataagctagaaataacattcaagtgtttttacttttactacagttatctggccactttgggactcattatactgaattagtttcacagaggaggtaaaatctgttgtttatgattacatattaactctaccattttaccttcagcattgctgtagtatgtcatatctgaaggcaattagcacaagtgacttgaagaattgtagttttgatgacttatatgtattttataaaaggcaggcagagtttttgtgtttgctttcccctcctctggacactttaaatttttgctaccacaggtttccaacaatttgattatgatgtgcccttgtgtaatgtggttggtgtttatttggcttggagttcgttgaatttttttgatctgtgtgggcttatacctttaatcaaatttgaaaaatgtcttcagatcctttttcctcccatcctgttattcttttctctttctgggactcttagtacacacaagtttgattgcttgatactgtgtcacaggccactgaggctctttcctttcagtcttttcttctttcttcctttttttctttctgtgcttcattttgaatagcttgaatagttttgtttcctgtcttcaagttcacttatatttttttcttctgtagtgtctggtctgtttataccatcctgtgaatttcttttttagatactacatattttgtttatctctagaagtcccatttggttcttaatttttttttccattttggctctcattattcatgtttctttcaaaattcttgaacatatttagcatatttttaatagctgttttaatgtacttgtctgttaattccattattctagggtttttttctttctattggatgatttttctcctgattatgggttatattttcctgtttattcctacagctgttaatttttttttttttaattaggcattgtgatcttactttgtggaatgttagattttattgttttcctttaaagaaaggaactttgtcagacatctaagttacctgaagatcaactttatgttttgaagcttgttttcaagcttgatcagggaaagtctacgtttgcctttagtctaaaggtaatttagccctataataagatgtgacccttctggagtctttgtagactgcctctggtgatcaacgatctcttctctgacttttcagaacgttaatgcctcttacctttgtgtaagtccgtcctaagaatcattcagcttatggttgtttgcccagccccatagagttttagtctatgcatgcttgtcttcgtattctgcaaagaccaaaggagtcccttagggagatttctggagctcttttcctgcctagcttcctcctctccagaactctgccccgtgagttccaggtccttcagcttccagggctctgaactctgtctccccaactcagtgctctccttgggattcttctccctgttctgttgtctgcaatgggtcccaggaagaatgtggggcaactgtaaggttcacccttcatttcccttcccttagagatcatagtcctgtactgcctgttgtctagtatctgaaacagttgttttatatgttttgtccaagtttagatttgtttgtggtgggagggtgagtctggcctcccttgttatatcatgttggcctgaagcagaagctgagtttcttttattttttaaatatagtttcaatttttaacaactattaaataggcaagtatcaacaacaatagataacaatataatagatatgcatattcctcccactttatcaaatcttaattttcttcaatttttttttttttttttaatagggtctcactctgttgctcgtgctggagtgacagtggtgtgatcttggttcgctgcaacctccgcctcttgggctcaagtgatcctcctgcctcagcctcctgagtagctgggactacaggcatgcaccatcatgcccagataatttatatatatatttttttatagagatggggtttttgccatgttgcccaggcggtctcaaattcctggactcaagcaatctgcctgccttggccccccaaagtgctgggattacaggcgtgaaccactgcgcctggcctgttttcttcagttctttattaagaaatgaaacagtaaaatacagctgaagccccgtgtttgttctttctgattctccctctgtgcccctctgagataacttctatgagttttgtgcatttttttttctttttaataaaaacagggtcttgctctgttatccaggctggagtgcggtggcgagatcatactcaatgcagcctcaaccttatgggctcgagtgatcctttcgcctcagcctctcaagtagctacaactactggtgtgtgctgccatgcctggctaattttttatttatagtttttaaagacagggtctcactatgttgcccaggctagttttgaactcctggcttctagtgatcctcctgccttggtctcttacttaaagcactgggattacaggtgtgagccactggctgctcacatgttttttataatagtacttaataattttatgtctgaaaatattatataatgttattttgcccatttaaaaactttaaaaaatgctaacaaactgtgtactctgtaacttgtcttttttactcaacactacgtttttgagaatttttcttgttgatctgtgtagttccattttaactgttatatcttactatgtttcattatgcaacagttggttcaatccattctcttgttaatggaaatttagtttgtttctaatttttgccagtaggaacagtgttgcaatgcatattcttaaacatgtctgtacacatctgagggtttcatttatttgtgacaaaacttgccaggtcatagtgtttatgcaccttcaactagatattgtcgttgtcaaagtttttttccaaaaggattttaccaatttatacatgaaccaccgatagatatcctcttaacacgtggtattctgaaacttaatttttaccaatcagatagatgtgaaatcacgtagacttagtttgcatttctttgacttctagtgagaagtagtgtcttcacatattttttggatttttaaaatttattttttatttttgtttttcttagagacagggtcttgaacttttacccaggctgaagtgcagtgatgcgatcatagctcacgctaacctcgaactcctggactcaagtgatcctcctgcctcagcttcctgagtagctgggactacaggtgtgtgccaccaagcccagctaatttttaatttttttttttgtagagacatgctgtgttgcacaggttggtcttaaactcctagtctcaagcagtcctcctgccttgactttccaaagtgctgggattacaggggtaaaccaccatacctggccatatcttttggatttattggtcatttggattttcttttgggaattacctgttcatatttttctccatttttctgctgaataatttgtcttttcttacttatttttcaagaaattttacatattttctggctgttcattgtcagttgtatgtgctccagataacttgaacagtctgtggttgccttttaatttttgaattatgtctttagttatgcagaagtttaaaattttaacataaattaatttacactatttttctcactttagcatgagtctatcagatggggatgtggtgggatttgacatggagtggccaccattatacaatagagggaaacttggcaaagttgcactaattcagttgtgtgtttctgagagcaaatgttacttgttccacgtttcttccatgtcaggttggtatctctacatttcatttttatatggctgataattgtaatatgtcaactttatccctataaaattaagttcttttattagctggccgttctctcattatctcaaatttatttaagtatttatgttctacctgattcactcacattccttgttttatttaattttcacaacatacctgtgaggcattgacattttttctgttttagagaagagaaaactgaaattttaagaggctaaatgaccaggatatgtactgctattgctagcaggagtggcattcaaactgattattttttcttgtcatttatcaatcaggactgtttgctttagttaagaaatactcaaggtcaatgtgtttctgaatttaaaattactgttaaatacaaatttacacataaacatggtatgtataagaagtaggacataaatccatcatacttgacagaacttatggaaataacaagaaaatgttacagtttttccccagggattaaaaatgttgcttgaaaataaagcagttaaaaaggcaggtgtaggaattgaaggagatcagtggaaacttctacgtgactttgatatcaaattgaagaattttgtggagttgacagatgttgccaataaaaaggtaaaagcaatatatatataattttcatgatgaagattattttgtgttacacagaatgtactttctatctgaatgttagatttttttttgaaaaagcttgttatataatgtttttgtagcaataaaaaagttccaagtgaatgttctttaatgaaaacctttatttatttatttatttttaacttttgtttcaagatcggggtacatgtgcatgtttgttacacaggtaaacttgtgtcatgggggtttatcatacagattattttatcacccgggtattaagcctggtacccattagttatttttcctgattttcttcctccctcctcccaccctccacctcccacagtgtgtgttgttcccctctgtgtgtccatgttttcttatcatttagctcccacttataagtgagaacatatggtatttggttttctgttcctgcgttagtttgctaaggataatggcctccagtgccatccatgtccctgcaaaggacatgatcttatttattttttttatggctgcatagtattccatggtgtatatgtaccacattttttttaatgcagtctatcattgatgggcatttaggctgattccatgtctttgctattgttaaatagtgctgcagtgaacatatgcgtgcatgtgtctttgtaacagaatgatttatattccttttggtatatacccagtaatgggattgctggggcaaatggtatttctttctttaggtctttgaggaattgctacacagttttccacaatggaaagcctttagttctaatccatgtcttggcatagagtttcttttctttttttttttttttttgaggtggagtttcgctcttgttgcccaggctggagtggaatggtgtgatctcagctcactgcaacctccacctcctgggtttaagtggttctcctgcctcaggctcctgagtagctggggttacaggcatgcaccaccatgcctagctaattttgtatttttagtagagacggggtttctccatcttggtcaggctgatctcgaactcctgacctcagataatctgcctgcctcggcctcccaaagtgctgagattgcaggcgtgagccaccgcacctggccggcagacagtttctttttttctttttgagacagagtcttgctctgtcgcccaggctggagtgcagtggtgcaatcttggctcactgaaacctctgcctcctgggttcaagcgattctcctgcctcagcctcccgagtagctggcactacaggcgtgccaccacacccagctaattttttgtattttttttagtagagacgaggtttcaccgtgttagccaggatggtcttgatctcctgacctcatgatccacctgcctcggtctcccaaagtgctgggattacatacagtttctttaagcaagccttctcttttccttcctcccagttcttggtactctttcactttcatatatttgcaaatgtaaaattgtgttttaggtgtatatttttaatccatgtataccagtaacttaaaaaaaaatttttttttttttaagggagagcataatggagctcttgtgatacggtgctcttagtggaagtttggctatcaattccatcacctgtatttcacatattttattaatgaagttcttaaattaaattctcatatttagccaagtattcatttggctgggaggtagaaagcctactaaccaactttttttcatgaacaatatttttaaagtccaagatttttaatacctacattagggaaattctagaattaaattcttacaatgtggactgcatatgaggcttttagtgacagggaatttgttgaaggctatctgtgggttgtattttggtataacatttcctaattttatttgtggtatgttcatttgatatcatttggtaatacctgaaaacaggaactgattttactgtgttgctttttcatcatttctagctgaaatgcacagagacctggagccttaacagtctggttaaacacctcttaggtaaacagctcctgaaagacaagtctatccgctgtagcaattggagtaaatttcctctcactgaggaccagaaactgtatgcagccactgatgcttatgtacgtgcttaaagatctttagaaattgtgatgtgttttaaaaacattattataaatgactttagaaaaattttattatagtagtggcagaaactctaccaaaatattttatatcaatttggcattgaaaaatgcttaggaagacatttagtgaaactattcattttcgatattaattagcaagtaccaatcaacagattgttcaatgctagtttattttcattgtcatgaagccaaattaatgtctaatttgtatgttaaaaaatgtgaacttgctgaaaacatgaaaggctaataaatccaggctgagcaagcataaatagtactgatgatggatttgatatataaacaattcagaatgaaaataattatagtacagtttctattttaaaactggccttatttcttatatataaaatgtggtgaaattttagaaaaattgcctccaaatttagcttgttgctgccattagatatatttttatatttacatgtttgtatgtagtgaaatctgggcttatctttatatatagcactattgtgtgttttttaagaaatgtattttattccacagtgaatttgttttctcctaactcatgctttcatttgtagatgaatattttattgtttctcctttgcatctatcaaaggaatggaaactcctttgaattgtaaccagcaaacaattcacttttgttagggaaattggatgataattttcctttaaaagataccgccaaacttgagactaacattctcagctgatttaagtaggatttctcttactagattgcattttgttagattccattttaagttattttatttggatattgtgtgtaatattgagtgtgaaaaagtgaaaacaaacttttaaggctcaggcacctttctcaattttcacaattggtatgattattaaatgaggacatattgatatttgtgtcacataataggttgaattccatgtttgggtgctttgtgaatcattctcttcgatttttctgaagatgggacttactgttttatttcggtgatctttagcatactttttaaatttttctgtttttttataggctggttttattatttaccgaaatttagagattttggatgatactgtgcaaaggtttgctataaataaaggtatgttaagatccataaataaaatgtgaattcactcttttgtgaggtttatctccaaaaaaggcaatattcacatatttgcaaagcatttagtactataacttcttgaatgtctgagcagtcctgacattagggtgggatccatcagggcccaagatgagtgtttcatctttgttacttgtggcaaagcagcccttacttcttttactttgtagcattgctatgtatttggcttctagagttggggctttgtggctttcttattgcagtgacacaaccagctttctcctagtctggagattatacatccttgctataagtatttaaaatgctttctatataatgctttaaaacatgtaagatggcttatccccaagatggtagctaataaacactaagtgataaagtaggtaaagatctatttattcatttattaaatattgttggtcattttacagtgctttctaacatactgatttacatttctaattttcttctgtcatttttctccaaaaataatggtcatgtcatccaacctcagtgctgtttttagaggtcttgataagccagtgagagcagaaggagccacgtagtagagtgggtgagcccaggctttttgttgcacagaccaatgtgaatcccagccatgtgacctgggatgtacctgtttctccaaacatggaatgtagatactagcataatgtccgttttaccgttttatagaataattgtgaagacttaaagggacaaactattcgaagcatctgtattgatataaagttatcactattctcgtagcttccttttggagattttaaatgattgtgtttgttaagatgttaattaaattaggccattttgctaaatgctcttaaaaatatggcatgactgcctcatataaaatgatatgatattctttataattgtcgttgagcctctgtgggtggcaggccctcctttatatgttaaggtagaagagtctttattcttacttctcctccctggagagccacttcctatgaatgcctgctggttctctgtagtcagaggtcttgtggctgtaacttagagtcagtctccatatccctgggttctgcatctgtggattcaaccaaccacagattgagaacattcaagccaaaaaaaaaaattcacagttttaaaaaaggaaaagttgaatttcttgcatggagtaccacattgaatctatatgaatgaagtgatgcgtaggcattttataaggtattataagaaatccggagatgatttaaagtatacaggacaatgtgtatagattatatgcaaatattgcagcattttatataagagacttgatcatctatggatttgatatcagtgggagggaggttcctggaaccaatccctcaaggatacagaggaatgactgtatgttaattaactgaggcaggtgatcggttttttaagctgattagggaaacagtatataagaacttacttaactcataataaaactaaaattcaacaggggagagttatgattttttggctttatggttgtggaattgcatgtaggttacatgtacaattttgttacatgtgcaattttgatgaaaatgcttccaaggaatgtttatgatatttttcactaaagtaacatatattaataacacagtactggaagtcctggtatctgtgtacttgtcattgtaatgctacattatttgaccttcactttttttcccctttattacattatatgtgtgagtatattgtgacatcttgactcagattccagtgaattgtattaggttggtgcaaaaataattgtggttttggtaatttttaatggcaaaaaccacaattacttttgcaccaacctaataactaagattaccatctttttttccttccttcctcccttccttcctttctgttattcagccagaagtatcagcatcactgttctcttattttcttcatgtacatatggatgatattttcgaatgaccacttttctcttttgctttttattattagactgtttttttcttcttgttaaaggataaaaagattagaacataaaaggatatttacacattgtttccccattgacttattcccaagatggtagctaaaaacaccaaatgatatagtagttaaagatacattgactcatttattaaatattgttgagcattttacgatatgggaataccgtagtgaacaagccaggcatactctgtttcctgaggggcctacagttttattggggatatagatgagtgaagaaagcaattgcagtgtagggagatgagtcttatgtcatgggaaaacaaggtgctgtagttgacacaccgagaggcatctgacacattgggggaaatattctagaatatttcctggagaaagtgcaggtaaaagccagacctgaaacctgagcaagagttagctaaggccaggtgcagtggctcacgcctgtaatcctagcactttgggaggccgaggtgggtggatcacctgaggtcaggagtttgagaccagcctggccaaaatggtgaaacaccatctctactaaaaatacaaaaaattagctgagtgtggtgacgggcacctgtaatcccagcttcttgggaggctgaggcaggagaatcgctttaatctgggaggtggaggttgtagtgagctgagattgcaccattgcactccagcctgcacaagagcgagactctgtctcagaaaaaaaaaaaaaaaaaagttagctagctgaagagtataggaaagaatgggtacaggaaattacaggtgccaagttacagaggtgagagaaattatggtatctataggtaattgaaagtaattcagtatagtgaacattgaatagggctgggcggatgaaggcaaagcagaaaaaggaaagcagatgggccatggtaaggagtttatatctcctcccaagagcaatcgaagtgactgagagttttaaacacagcagtgaagtgaattacattaaaaaaataagaacttgggctctagaataaaaaacggatataggaggaaggcaggagtcacagtaggaatatcttttgggaggctgtgacaataatccaagtgagaagtaatggcaacttgagtcggttaattgtgttgagaatggagagaagttgacaggttcaaaattcatttttcttctttttttgagtctcactctgtcacccaggctggagtgcagtgatgcgatcttggcttaccgcagcttccacctcctgggttcaagtgattatcctgcctcagcctcctgagtaactgggattacaggtgcctgccaccacgcccagctaatttttgtgtgtttagtggagatgtggtttcgccatgttggccaggctggtctcgaactcctggtctcaagtcttccgcccacctcagcctcccaaagtgctagaattataggcatgagctaccacacctgacctcaaaatacatttaatagagcaagcatgagccactatgcccagcctcaaaatacatttaataaaccaatggaatttgaggtaatgatgaaagacacatgtcaaggatcattcctgtgttgttggcataagcaacagggatgaaaagcattgaggaagagcaagattttgggatgcgttgtcacacagttgattttaggtatgttaagggagggagacctgtaagacagcaaagtggaggtggtgcaagaattagttgtgttggctgtagcacagaggacagtttgagttaagagagttgggactgagaatcccgaggaactcttagtgttgaacatttgcgtggaggaggggacaccaaaggagttgccatagacatcgaggaaattaggaggtgtggtgtgcagaaagccaagtgaagaacatgttttaagtaggaggatgctatcaactgttttaaattctgctgagagtttgagaaactgaggacttagaattcatcattagatttggcaatgcgccaatcatttgtaatcttttaaacaatagttttgctgtactgggtagcaaaagagtgatttgaggagtggtcatttggagcatatgctattcaaacagagaagagtccacgggctttggtaacatgaaggtcctataaccatagcaagagaatgaggtgggtggaagtcatattaacgtgaatagaggagtaggttagatctgaggaatgtgggaacagagacagggtctcattatgttgcccagcctggctcagactcgtggcctcaagcgatcctcctgcctcagcctcctgaatacctcgggtttcaggcctctgcatctggcttgaaaacaacattttctcagaagcttgttttagttgttttagaaataacgaaggcatgtgtaaacaactgttctagaagcttagtttggaaagggaacgtttattgatgcatataacacttatatgttgggtgcttatgtgtcaggcactgttagagttgctcgggaaaatttacaaaccaagcaaaccatgccccttcatttcctttgggtgaagtgagggagccatgtggttatctgaaggaagagcttagcaggattagagggaagaaagtgcaaagcctcctagggtgattggctggctcttttggaggaacagtacctataactgaatgaaatgagtgagggtaagagtggcaggaaatgaggctagaaaaggagcttgggccatatcacgtagggcctcgtaggctgtgaatctgacttcatttcttattaatgaaaataaatacgatgatgggtgatgggaaacccatagaggatttggagcagaagaatgatataattaaaattttattttagaaatatttttctggttgtcgtaagaggaaaaatatttagccccagggcattttggcagagagttaggaggctattgtaacagcccaagcaatagacaataattgtttggattaggcgggtagcaatagaggtgatgagaagtcgtagcttctgtaggtatttggaagatatatattgtgaaggatttgctgatgaattccctgtaaggggtgagatgtaaagattcatagaacattaagatattttggtcagatcatctgatcaatggaaaggtcagttatagtggacagattatgagaagaacaggtttgggtgagaaaactttagatttcagtgttggatatcctaagttttagatgattattgatatccaagagatatcaatatttgggatcaatttgggaaatatgatcccaaagttcaaggttgaggttggagatgtaattcagatccgatggtagttaaagcagtgagactgaatgagataaaatagggagtgaatgaaataaagagtaggtgtgatattgacctcaagggcacaccagcatttagaggttgggaagatgaggagagagcagcaaagaggactgggagggccactaatgaaggagggaagtacaggaggtgtttagttctgaagccacctgaagaaaatgtttggaataggaagaagttgtcagttgctttaaatcattcggggaggttgagtgagatgagagtctagaactaacagttaggtttgatggtgtggaggccatcagtaaccttttctttcttttttttttttgagacagagtcttgctcagtcacccaggctggagtgcagtggcgcgatctctgctcactgcaagctccgcctcccaggttcacactattctcctgcctcagcctccggagtagctgggactacgggtgcccgccaccatgcccggctaatttttttttttttttgtatttttagtagagacggggtttcaccatgttagccaggttggtctcgatctcctgacctcgtgatccacccgcctcggcctcccaaagtgctgggattacaggtgtgagccaccgcgcccggcccaagagtaaccttttcaaaagcagctttgctctactgatttgggtaaaagcttagttgcagttggtttgggaggaaatgggagcagaaaatttgagagagtgagtgtagacaactctttcaaggaatttcgctataaatgggagtagagatctgaagactgaataattagcaaactgaaaagtgggaagacgtaattctcttattatttcatttttcttagtgaaataagaggtgaagttctctgagtaataggagggtcaaacaggtgttagaagttcacaaagaaaggaagaggtttgaaatagtcattttgagagtgggaaatgtagaagaattaacagtcattgctgagggtgcgtttgaaatctgtcatgagtttaaaataacttgtgtcatcatcgatgtgtttattttcaactatattcaactgcttgggtgtaggcatcaggtaggtaaaaaaagtgggttttattatgagtagaggttttgccacgtaattaccatggagggagggaagagcaaaggagttgagagtatagatacaaaggaatgattactgtaatgtgggtaagagaggaatggaaggctcagtgggcagtgggagtagggatgttgataggtaaggaaaaggtgataggatcaatgcatttggttctgcaagtgtcaaagtattgttggggaaagcatgctggaaggaaagatagggatgctggtgttctcagggtggaaggcttacagttgtagtctggaagtggtgattttattggcaattataaggtcaacggtatgactatggaattgagtggctaaggtctgttgaagaaaagattgtcggaaatgcaggggtcaaggaactggcctgtggatgttgaactcactggcagtgatcaaggaatagtagtggagtgaaagtagttaatgaatcaggcactaagatctccaagggatgaaaggatgcagtttggagatgacaagataactgtagtaatcaggaatagcaggttttgtagctctgtctcataggcctcagaggagatgggcttttgaaggacaagagaaatgatgatgaataaattctaagcaggggaagtgtttgggaaagcagggcaggctttgtgctgttgatggcaaatgatgtaccagacaggatgaagttgagaatttggaagttgatcactgattagaaaggcttacattttattttggccgggggtggcagctcatgcctgtaatcccagcactttgggaggccaaggtgggcggatcccttaggccagaagttggagaccagcctggccaccattgcgaaacactgtctctactagaaatacaaaaaaaaaaaaaattagctggtcgtggtggcacatgcctgtagtcccagctactccgggggctagggaatgagaatagcttgaagccgggaggtggaggttgcagtgagccgagattgcgccactgcattccagcctgggtgacagagtgagactctgtctcaaaaaaaaaaaaaaggaagggcttacattttattttggtgctgactgggaatgaaggcaatgagggatgactgttggagaaggctgtgcttactaaacagtattattaagtagcagcatacatggtgttatactgacttctgattttgcaatagtacagacaggttcagattctcatttccaccttctccttctgcctaggtgaataactgctgggttatagtacagatgactgcagatcatttggaatttactttaaatgtaaacagtaaaaatttgaaagagagggaaagtgattgaggcaatttggggattgaataagaaggtctttttgttggaattcatttaaggaaagaaaatgaaaatttgatccctaatattatttaatgaagtggctaaatgaatatctctgctttgtggtttgaaaattaatattgattttttttccccctagaggaagaaatcctacttagcgacatgaacaaacagttgacttcaatctctgaggaagtgatggatctggctaagcatcttcctcatgctttcagtaaattggaaaacccacggaggttaaatattaccttttttttttttaacttaaatcaattctgtttatttttttatcacattttcctatatgtgaagaatactattcattaaggctgactcatagaaatttgcttgaatacacacacacagactgatgcataaatttgagaaatatctttccagttgttgaatagtgaatccaaaggtttaagccttttctgtctgctttgtaggatgttttatgaaacaaaggaatagaaattgtattcatattatacattttgaaattatatctatattatattttttgtcaaagcaaaataaattatacattaaggaaaatatttaagattcaaagttgtcattttctttctgttaatgagtatctttgatttaataacatttatagtttggtcacttgaaatctatagtgaccaaaagcaatgtcatatttagtagcctcatttctgttactatctgattattacttaagaattctacttaattaatagattattagaacaaaaggcattccaattttagagattcttttatggttaaagcactaggtaacttaaaaaatttggatcaaatgttatacagattaatagaccttggaatacaggggctatgtctttttggaatcagaccttgtcctggccttaattgcaggatgacttccttattaaatctctaaaagcaggaatgctctggaacaatgaacaattagaatgtggtaatgtaattttgggccaaaaaatactttgtagaaatgtgattctcttacttggaatagaaagaattctgactcgaaaaagtgcagttaatgtatgcttttctgggtaagatttgtgatagattttgattgagatttaaaaccatgatatataaatttagcttttttgtcaaagtaatttgccaccctagaatttgtgttggtaatttttaatgcaacttggacaatttctgaaagatgtaactttcttttttttgagacgagtctcgctttgttgcccaggctggagtgcagtgacatgatctcaggtcactgcaagctccgcctcccgggttcacaccattatcctgcctcagcctcccgagtagctgggactaccggcgcccgccaccccacctggctaattttttttttatttttagtagagacggggtttcaccgtgttagccaggatcgtctcgatctccggacctcgtgatctgcccgcctcagcctcccaaagtgctgggattacaggcgttagccaccgcgcccagcctgaaagatgaactttaaaatggggaaggatactagtaaagccatttcttactcatgtatacatttttccctccatgaaattagagcagccaccttttacatgacttttacatgcatttcagatttttgtactagcaattaaaatatctactggatgtaaatcacatgtgcttaatgctttgcttcataatatctgttgaagtcaattaaaatatagagacagatctttaaattgaacatgttttatttgggaagcaagaattaaatttgaggcatatacacagactgggtgtccttggtatctctgaagaacaaagagaagtttggaggttatagaaaaaggaaaatgtgacattgtttttccagaaagttctttggcactagtaaattttggggagttggaagctctgatgggttagtgactgtggtgggtaaaactagtcttagagtcacaacaggttgtttcagtatctattagataaaacaggttttaggttacaataggcagtttcagcagctaggcttgcagaaaattacattcttagagtaatgttatgtgccttgagtgcttttttccccttggcccttgactctgatttagttgggtatgacaagaattatcaatttatataattactttttacatattgaagctgaataggttttcttaaaacttggaaatgggaaatactgggtcttgtgaagttttagtgtgaaaacgataactagtctcttatttcatgctctttgtaacaagtctacagtaatacctaatgtatctagatgacacctcagaaccaggagggaacaaaaaagacctctgagcagtcaaaataatgctataagcatgtattccagcttactttcggcatttctgtggagtgcaggaggccacattttgttcatagatccagtttgacaagcttgggtactgagttaaagtgaaaatggtgtaaataagtaatcatattcacatgacagtaggtggaagtgacagctgacaatctgaaagagtggacaaaactataaaaattagaactaagaactcttaaaatagaacggtttgaagtttgttacagaagggagcagctttatgcttcagtggactctgaaggtattggcagtgtatagtactgcttagtcattgatttaaattcggtatatatctcttctattgctgtcatgtacttgacattctgctgggtgctaaggctgtctgcaggctactaatatgcataataacaatcctgaaaaagaaggaaaagtatactgtgccttactgaagaaggcaggacagccgttggtatttgttagagtaaatattagttatcttacataaagcatgttatattccctgatgtcagggcctgataaatgagcccttacactcttgatagtcaatctgtgccactgttgctgtgtttgtatgttacaccatttcctgtccatgtaacagttaaactgtatcacatatctgttcctactaaactatttgcatataattttaacatttgagtggctgtatataaagctaaaagttctttataagatttatagcatcttagaatgtttaaattagataacattagtgtgcttttagtttttgaatttaattttgctcttgattttgtttgtgttaatgtagactttgtctacgtaagcttgagcccaactttggagtggtgttttcagtgatggaagtaactggaaataactcatgaaaccacttagtacttttgatagtttattcccatgaaggatcaaatttttacttgagtcattaatataaaaatttaaaagacatgtcagattttattaagcatggattttaaatatataaatattagaagacctaaacaaaatcgctaatgaaagagtaaaacatgtccctgcctatcatactcccttcactttcactgatttctgcttttatgaagtactttaataagctctacaacaaataaacaagacattgtgcctcattttacactctagcagtggttttccattccaactaactagattgggtttataatatagtcatttaaacttacttagttaaaatgttatacattagcaactgcaattaaggagctaagaaattcagctcgtatttatttatatgcatcttatccatagtttctcacttgttatatttgcctactgatggcaaattgattttttctgttccaaaaatgtagtgttttgagatttttggagatgcaaaacagcatcattttcaaattagatcacaaacaatcttacttgttgcagttgagactagtaattgatcagtgaggtgaaaaaattaggcaaaacggtatcatcaaaattttctttctttttttttttgaaacagagtattgctcttgtcgcccaggctggagtgcaatggcacgatctcagctcagctcactggggcccctacctacgggattcaagggattctcctgcctcagcctcctgagtagctgagattacaggcgcatgccaccaagcccagctaatttttgtatttttagtagagacagggttttgccatgttggccaggctggtctggaacttcagacctcaagtgattcacctgcctcagcctcccaaagtgctgggattacaggcatgaaccaccgtgcccgccccaaattttcttttaacttaaagtgttaatgtttgtttgttcccaatatttttatatatgtcaaggctttttcattatatacaggccagctctttggagttctgcatagtgtttcttgtttaaaccacacctataatgtaccatctacaatttccaattctttaagacagagtgaaaaattaagacacctgaagcaatctgagtgcggagtcctaggcattatgattttccttgacacttttagggttcttttatcacagtttatcaaacacctttttttttttaacaaaaaacaaatttacaaaatctttccatgtattcaacttagaatttaatgaaatagggtttttttttttttggtggtcatgtatcatcaactttctttacatttaattaaattaatcaacaaaaaacatatagttgacataaacaaatttgggaccaagcactactgactcttagtaaacatacaagtcaactgttggtgcagaagtgccttgatgctagagagtagcctgcaagctgtaattatatatgggcattagggaatgaagaacagccttaatactattgatcttttaagtgaaggtcagcttagaaagcttttacttgttaaaaagcttcacagtttgtccttgtagttaatgcaattgaagttgaattaatctttcttaattttttttttagggtttctatcttactaaaggatatttcagaaaatctatattcactgaggaggatgataattgggtctactaacattgagactgaactgaggcccagcaataatttaaacttattatcctttgaagattcaactactgggggagtacaacagaaacaaattagagaacatgaagttttaattcacgttgaagatgaaacatgggacccaacacttgatcatttagctaaacatgatggagaagatgtacttggaaataaagtggaacgaaaagaagatggatttgaagatggagtagaagacaacaaattgaaagagaatatggaaagagcttgtttgatgtcgttagatattacagaacatgaactccaaattttggaacagcagtctcaggaagaatatcttagtgatattgcttataaatctactgaggtactaaataaagaggaagcacatttttagttattagtaggttctggcagactttattcccgtaaagagacagatagtaaatattttaggctttgtgggacatacagtctctgttgcagtaactcagttctgttattgtagtgtgaaagcagccacagacaaatgtaaacaaatgtgcctgtctttcaataaaactttatctacaaatacagatagtgggccacatttggcttgcgagctgtagtttgctgttcctgacttagtatgatatgcagcattgtgtagtggaaagattttatagtatcaacagacatttgtaggagtttgctattttataatttcgtatgcttttttcataatagatgtctctgctttttgtggattctcttcatatctactagtgtttactcttctgactttgatttttgggggtgtattttatttctttatacagaatttttttcttttttctttctttttttgagacaaggttttgctgtgtcaccccagctggagtgcagtggtgggatcttggccccctgcggtcttcaactcctgggcttaagcgatcctgtcacctcagcctccctagtagctgggaccacaggcctgcaccactacactcagctaatttttgtattttttgtagagatggggtttcgctctgttgcccagactggtctccaactcctggactcaagtgatccacctgccttggcctcccaaagtgttggaattataggtgtgagtcactgtgcctggcccagaatttctttacttgctcatgtgagagagtttctaataaactcctgatgcttttgcttgacactatagttttactgtcatctcagagtcagattttttccttaatttcttcattaaattgatttcttaatttctcatttgttttgcattagtttacaaaattacttaagatgcctatattctctgaaattttatattttatttcacgataaataagtttaaaaaattagatttgaccatttaattagagttatttccccatcatttttctaatggcaacaataattttagcatttgagcaattctctgtattttggtaactattagtaatcacttttatcagtataaacatgcatttcattttaaaatggttttcaaaatattctcataccaaccattcataaaagatgttccccttctgggaaatatcagtttttgctaacatctgcatttccctttgattttctaggaatttcttattaggtatacactttaagtgatatgtttcatataatattataggattatcaggatttcatgattttttttttttgagatggaatctatctctgtcgcccaagctggagtgccgtggcgcagtcttggctcactacaacctctgcctccccggttcaagtgattctcctacctcagcctcccgagtcactgggattacaggtgcccgccaccacacccggctaatttttgtatttttagtagagaaagtgctgggattacaggtgtgagccactgcacctggccttggatttcgtgatttgactgacatcttttacaccaattattgccatttttttattgggtactaattattagtattgctttctttattcgttaaataagaagtaaaagaacttttaaaaaataaaataactttttttcctagtacaaagcttattttcaattttttttattgcttaaattttgcaggttaattaaggctgtacttctttttcctacttcctgtttaaatatttggcattttttgagggttttctttctatggatttttgtgggggatcccatctcgttggacacttggttcctggagattgccaaattattgaaaagtttcctcatacccaaacattggcaatagactgaataaataacatctctgacattatttttcaattatatagagaatgctttttgtaaaatactgatttatttaaagatattacaatcatagtagttttttgcaatcttttttaaatcagtggatgtcaaggaacaactattgttctttgtacggcatttttcaacattgtgaagagttcttatactcaaaaagtttgggagacacagtgtgacattgtttaacctgagttgaacttgtcattttgtattcttgtttagagcagggattttattttgtctctttatctaactttgtattcctaactatttctttctttctctttggttctttgtttctttgttcattcttctctctctcccttttttatctatcatataaatatgtaaatatatattatatatccattagggaagaggaagttgtctaaagatatctagtatataggagctttgttctgcagaaaagaggatatgaagtcaattatattggaaattaatgcttaatactttttttaaagcatttatctcccaatgataatgaaaacgatacgtcctatgtaattgagagtgatgaagatttagaaatggagatgcttaaggtatgtttacaattataaaaatattacttcaagttctttccaaaggacatttaattaagtaaaatattaactaattctaaactaggttctaccacaatgaaattgctactaattatgtaacattagatttcacattttccaattcatgtttctttcatgtagtctataaataatgggttagaggtaatttactaattttaaatgtgctttccttgttccttcttattttttattttgaagacagggtctcactctatcacccaggctggagtgcagttgctccatctcggctcactgcaaccttcacctcctgggctcaagtgatcctcctgcataagcctcccgagtagctgggattatgggcgtgcaccaccatgcccggctaatttttatagttttagtagagacagggtctcaccatgttgtccttgctggtctcgaactctttacctcaagtaatccacccgccttggcctcccaaagtgctgggattacaggtgtgagccaccacacctggccttggatttcatgatttgactgacatcttttacacaaattattgccatttttttattgggtaccaattattagtattgttttctttattcgttaaataagaagtaaaataacttttttttaaaaaaagaacttttttcctagtaaaaagcttattttcaatttttttattgcttaaattttgcaggttaattaaggctgtgcttccttttcctactttctgtttaaatgtttggcattttttgagggttttctttctatggatttttgtgggggatcccatcttgttggacacttggttcctggagattgccaaattattgaaaagtttcctcatacccaaacattggcagtagactgaataaataacatctctgacactatttttcaattatatagagaatgctatttgtaaaatactgatttatttaaagatattacagtcagtagttttttgcaatctttttaaaatcagtggatgtcaaaaacagctattgttctttgtacagcatttttcaacattgtgaagagttcttatactcaaaaagtttgggagacacagtttgatattgtttaacctgagttgaacttgtcattttgtattcttgtttagagcagggattttattttgtctctttatctaactttgtattcctatttctttctttctctttggttctttgtttctttgttcattcttctctctctcccttttttatctatcatataaatatgtaaatatatattatatatccattagggaagaggaagctgtctaaagatatctagtatataggagctttgttctgcagaaaagaggatatgaagtcaattatattggaaattaatgcttaatacttttttttaaagcatttatctcccaatgataatgaaaacgatacgtcctatgtaattgagagtgatgaagatttagaaatggagatgcttaaggtatgtttacaattataaaaacattacttcaagttctttccaaaggacatttaattaagtaaaatattaactaattctaaaccaggttccaccacaatgaaattgctactaattatgtaacattagatttcacattttccaattcatgtttcttttatgtagtctatgaataatgggttagaggtaatatactaattttaattgtgctttctttgttccttcttttttttttttttattttgagacagggtctcactctgtcacccaggctggggtgtagtggtgccatcttggctcactgcaaccttcacctccagggctgaagtgattctcctgcatgagcctcctgagtagctgggattacaggcgtgtgccaccatacccggcttatttttgtattttttgtagagatggggtttcaccatgttgcccaggatggtcttaaactcctgggctcaagtgatctactggcctcagcctcccagcgtgctggggattgcaggtgtgagccgccgcatccagccctgtgttccttcttgtgttactttcttgtaattttttcctggaatatgggtagtgatttggctctccagtattgaaattgagtttcctttcttccaattcatgtgtatccatttttatttggaagttttgtttttatacattcaataatcatctttactttctttggtattatttactatggatattttatattatataattttcaaatggattaaatggttcagttttactcttattattgagattgaaaatactagtttataatttatatattttctattcctttacctctaatttctttgtcaggtgttactaaccaaagatgtataataagaaaagccaatgtagctaaattaagtaaaaaatgaagaaaaacacagaagttccccattatgcatttttttattcctaatctttaggttgatgagatttttttatttttatgaaatgagattaatttattgacttttttagttttgaggccaagtaatgagtagtgagtaagaatgtatattctagggccaggcatggtggctcactcatgtaatctcagcactttgggaggccgaggcaggaggatcacttcattccaggagtttgagaccaacctgggcaacatggcaaaaccctctctctccagaaaaatacaagaattggctgggtgtggtggcatgtgcctttagtcccagctacttgggaggctgaggtgggaggatcacctggggagcctggggaggttgaggctgcagttagccatgaccatgccactgcactctagcctgggtgacagagtgagaccctgtctcaattaaaaaattaaaaaaaaaaaagtagattgtgaattcagatgtaggtttgtatcccagcttttccagttagtatctgtgtgactttggggaagtttcttagcatctttgatactcggttaacagttgtaattattatttaaggtattgcttgagaagagcttagtatagagcctgacatttagtaagtgtttaatacatattagctaacagtaaaactagaacataaatactgaattgtattttgttattaattatccatttctctgagaagtactgttccaatagtacatttataggaaacttgtggacgtctacaaacgtatacattaaatctcttagaaggcaacctggatgcccatattagagaactctattttaaacatgcattctaagtatgtttgtggacttgaataaaataaaacaaacagaaacacttctttcttctgccttcaggcttgaaatgaacatacttttttttaaaaaaaaaccttcaaaatgaaaatattaaataaaagatttaataaaaagagaaagtaaaaactgtagtttaataaagtcttcctgtctcttcatagttaaaaaatgttatagatgaaacaattttgaaatattcttgaaatagataatctttatttaggggagaatgtcagatactgtcaagccaaaataaaaacaaataactttatttcatgtttgtaaaattccttttctaaaatgatttgaatcttttgttgttttgacaattccaaaacacatttattgtttgctcatagtttcagccttattcagaaagaatgcgactgacacatgatatagagaaacttgttccaaaaataacattaaaatccacgtttactacttgagaatcgaaaatattgaggtgcaataaagaataaaatgttttaaattatccaaatttaaaatttatgatagctttccccaggggcagtttattatatgctattaatgagccttgtttatgctggaaatgttccatctttggccttgcgccttagaaaccattcatgagcacatatttaaaccggagcacacatgttcttttgtagtatggcttgcacatctgccagctttcgacaaaattgtaggccctgttaataatagtccttttgtgtttggtgaaaaagatacgacactgtcagtggttttgcttttaagatttcttttaaactttcagtctttagaaaacctcaatagtggcacggtagaaccaactcattctaaatgcttaaaaatggaaagaaatctgggtcttcctactaaagaagaagaagaagatgatgaaaatgaagctaatgaaggggaagaagatgatgataagggtaagcactgaagtatgtttgaaatgactcacctgtgatacctaccactgactttaacttaggatccagttttggatggtttggaggtcagggactttgtggcatatagttaattattggatccttataagcttttgtctccttagtgcttttgtctccataaagcacaatcttactacttagaaaaatagagtaatagcattatgatgataaaaatatctttccctttgtttttttgtatttctccaaatcattatagctctcatttagaattattaaagctgagaactctaacaatgaacttttattgtttagtggttaattatcttgattctttgttttgccctttcttggccactcaggaatctttcaagctcactgtggacagggaaagtgacttgggtagagctaacataacttcattgtgctgtgcagttagaattttgaccaaagatgtgggtaactaacttttcctaactaaatgacatttaggtaactaaactaaacgagattttcgtaactaaattttggtgtaactacatttagctttaggtaactaaaacgaagattttattttatctgtggatttttttagtgcgggactaatgtaatttctgattaccattaattgaaggttggttatattataacatttggattggtatattgcttgccatggtttgttctaaatgttagcctttagaagtattcctgattctaaaacatcagttttttttaatagtcctggcaaagtgtgaatcacaacaaaattctaatacttaaaagtaatccaagtgtcacagatggtacccagaagaccagtttgtattggaattaaaaaatagaaaacattaacccatggtagctgtcactgtattctttcaaagaagccaatgaaataaactgttttctccctctatgtggtgtttttctacttgaacataaatgcacattttattttatttccagactttttgtggccagcacccaatgaagagcaagttacttgcctcaagatgtactttggccattccagttttaaaccgtgagtataatctcatttaatcaaatcacatatttagtattctctttaaaacaagggaaaaggcaaataacctgtctgcttaacagcaacagcacaacttcactatagttatacatgccacactgtattttctgtgtgactacaaaattatttcaaagtgatatttatataaaattcatttctgcaaattgtttttataagtgaggaaaaatggttttcctttaactgagcagttctgagtagaaactagtttaaagatacttataaataaatgttaatttaatactgacttgtttttcattaaacgagtgtctatgtgcctgttttgtgtatattacccagaacatgcagatgtactagaagttcttaatacaacaatttgaggaatagtgataatcttatctattttaatgtactcaaaatttgtttacatctaacaggcacatttttgtgaggattaaatgagatgaataagaatgagatgaacaagtaaatgtgaataaaactaataagcctgtgaaaatctagactggatttttcctattctgagaatttaaaatataatccactgaagtatttctttccttttttcttttgatcttaaacattttttatttatgtcttacatacagaaaagtgcacatgttgtagagatcaatgaattgtcataaactgggcaccctgtggccagcacttagttaagaataggtcagtaacagcatgccagaagaccacctctccaattgatttttcccatgatattttattaagaaaattttctaagatgtagtaaagttgaaagaacttttttctgtgcatgtctgtattcccaccacctaaattcaactatcattactatacttgctttatcacatatccatccattcatatgtctctatccatccattcattcattccagttttaaaatgcatctcagggtcaatcgaggacaccattacacttccacctaagtatttcagcatgtaaattattaacgagttaaatatttacttaacagttttttctttggtgtaaaatttgcacgtaaggaaatataaaactttaagtgtacatttgcaaattttaaatatacatgtgcatacccatgtaacccaaattcttatcaagagatattattatcatcaccacacagagttcccttatttcccttttcagtcagtccttgtccctgagcatttctcttattattttaaagtattgattcttttggatatctagtatgaagcttagaatctgttttttactttagatgtatgtagtgaaatttaatatatataccaaatggtagttgttagttagcttgaatgggacattggtcaaatggcattgtttgttttaaagttccaggtttgtgcatttatgtatgaagtttgaaaataaattctatgagaggaaatgaaaaattgaatggattttaatttgtaccttgggtttcttattaataaaacaaaatagctttttgcttttcaccttcaagagttcagtggaaagtgattcattcagtattagaagaaagaagagataatgttgctgtcatggcaactggtaagttgtacttaagcaaaacctaatcctttaaaaaaataaaacataaagagtttgaaatgcttaatctttcattaaactctcaaaatacaaatgcaactacaaatgatgtaaactatagaagagagtgaacaaagaacagatgctcagatttatgtatcaattagcttttaggaagatagcatactagtattgaccattcatctgtataagtacattgtaaaaagaaatgaaagcatcaaaggtttatttttatttctatatttttttcattttatttttatatttttttcatttcaaggatatggaaagagtttgtgcttccagtatccacctgtttatgtaggcaagattggccttgttatctctccccttatttctctgatggaagaccaagtgctacagcttaagtaagtcatgttatcattgccacaatatcaccctctttttttcttctgtgggtgaaacatctgatccatcatgcatgttaaaatctagttcacaataacacatttctgcaggtattgctttatctttattggtaataaatgaccctttagtggaagagcttaccttctttcttgtgttctctgtaattcaaagctaccaggtggccctgataaaatttttttaaaaaacattattactttatgctggtttacattgaatatctcaaaattcttttctctttttgttacccttgctttttagcttgataagaagtgtatacatggaagtatattttttatctatgaaacacttttcagcttcttcaacctgagcttgcaatctgttttaaattgatacataatatctttacatattcatggggtactgtagtattttgatacactcatatcaaatacacttgatcaaatcagggcatttgttcatcaacttgaacatttatcatttctttgtgctgggaacatttctaatcttttctttgagttattttgaaatacacagtgttgttgttaactatagttaccctactgttggttaatgagtacaaacatacagttagaaggaataggttctagcaacctattcctttaccccctgtcatcccctgctgccctgagcttgcagtctctttcaaagacccaccttaaaaacttgcattctgataaggcccttgaaggaatttgcttatcaagttagtaagtgacaaaaaagaaaattgcaaagaacaggaatataaattattatatttctttattctttctcacttaagagtgaaattgatatgtgtaatgtgtacatggtgccagaatatttgtttttcttcttatagaatgtccaacatcccagcttgcttccttggatcagcacagtcagaaaatgttctaacagatattaaattgtgagtaatttttttccctcaacttttattttggatttatgggggtgcatatgcaagtttgttacgtgggtgaattacatgttgctgaggaagttgtgagtaatttatgtcatttctaatcatgtggtcagatgtctgtggtatatgagagaattttgtatacaaacaaattttactaaatgcatgaaaaaaaaagtccatgattttaaaatgcactttcttttgtacctttgcaggactgttactttttaaatccttcaaacttgaagaaatctgttattctcggttcttgggctataagattagcattgtactcatagaattataaaaattttggttttggaagagaagttggagaatataaagatttgtctcattttatagatgagaaaactgaggctcagagacaagtaatttgcccaaaatcacacaatgactggctgagcagggactggattctaggtctcttgcccaaccaattctatcatgatgtaattcctaaggagaatgtcatctcagatacacatacacacacccattttgtgtgtgtgtgtgtgtgtgtatatgtacacacacacacaaacatatgtacacttatatatacatacacacacatatattaatatatatgcatatatatgcatgttctaattcagaacattttcatcactcccaaaagaacacccctgcccattaagcagttgctttctttacgtatatattagtatatacatacacacgagatacacatatatttactgagttttgataaatgcatacaaagatgtaaaccaaacctctaacaagatacagaatatcactgacactctagaaagtttcttcatgtccctccccagtctgtccttccatcctccatcctaggcaagccactgctccgattttctctaccatagtttggtagaatgccatataaatgcagtcacacaatattaactcttttgtgtaagacttctttcatttgctgtaatgtttctgagattctttcatgctgttgcatgtatcagtagttttttgttttgttttgttttgtttttgttttttcagagtcagggtctccttctgtcacccaggctagagtacagtggcgcaatcatagcttactgcagcctctaactactgggctcaagctatcctcctgcctctcaagtaggctaggctgcaggtatgttccaccatgcctggctaattattaaattttttgtagagacaggatcttgcttggttgcccaggctggtcttgaactcctggcgtcaggattgtttccagttttggattattacaaataaagctgagacacatataagtctttgtatggacatatggtttcattttattgatacatgtcaaggagtgggatgactggatcgtgtggtggatatatgtttaactttcttttttctgagataaaattagaaggcgatcctcctgccttggctttccaaagtgccgggattacaggcgtgaaccaccgcacctgatgcagttgttgttgttgttgttgttttaatatctgattattattttattgtatttcattgaatatagcacagtttgtttttacattttcttattgatagacacctaggctatttttctggttttggactgttactaataaagctgctatacacatccttataaaaatcttttttgtgaacatgttttctttttttctaagcattttaaatcacctttattgaggtgtaattgacttacaataaattttatatgctgagaatgtataatttgataagttttgacacaggtatgcactcatgaaaccatcatcacaatccagataatgaacatattcatcacccacaaagtttacctttttgttttaaccccagtcaccgggtaactgctgagctccttcctgttactgtagactagtttgcattttctaaacttatatacatggagtcattcatattttatgtgctcttttttgtctgatttaaataatgcagtataattattttgagattcattcatgttattacagtgattaatagttcattcctcttattgttaagtggattacattttatggatatccaacaagttgtttatccattcacctgatagacatttggatcgtttccagttttgggttattacaaataaaactgctatgaacattcgtatgtaagtctttgtatggacatatgttttcattttattatatatgacggagcggaatgactggaacatgtgatgcatatatgtttaactttcttttttctaattgagataaaattcacagaacataacttttaccattttaatcattactaaagtccagtgggttttggtatagtaataatatataaccatcataattaattccagaacattttcctaactcccaaaagaaattccatacccattaaggagtcattccctattttcccttttcttttctttctttttttttttttttgagtcagggtctccctctgtctcccgggctggagtgcacttgcatgatcttggttcactgcatccttgatttcctgggctcaattgatcctcccacctcagtctcctgagtagctgggactgtaggcatatgttaccatacctggctaatttgttttattttgagtggagatgagattttgctatgttgcccaggttgctctcaaactcctgggctcaagtaattgtcccacctcagccttccaaaatgctgggattacaggcgtgagccactctgcccggcctattatctctgttctgcccacttccaaccactaatctactttctgtctctatgatttgcctattctggatgtttctataaattaacttatacattatatggccttttgtgtctggcatcttccacttagcatagtgatatcagtacttcattcggtctttttttatgactgaataatattccatagtatgggcatacacattttaaaaattcattcatcagtgatggacatttgggttgtttcctttttggctgttatgaataatgatgctgtgaacatttgtgtaccaatttttttatgaacatacattttcaacgcttttgcatatatgcctaagagtggaattgctgggctatatgctaattttttaagaaactatgaagcttttgagagtgattgtatcatgggatattcccaccagcagtgtatgagaggtccagttcctccccatccttgctatcacttagtctggctgatctttaacttaagccattctaatagtatctcattgtatttttagtttgcttttccctaatgactaattatattgagcatttttcatacacttattggccatctgtatatcttctttgagggagtatctgttcaaatcttttgcctattttttcttagtgagttttgatagtcatttctatattctgaatataaattatttatttgatatatgctttgcaaacattttctcctagtttatggcttttcatactttccacacagttcttttgaagagcagcagtttttcattttgataaagtccagtttgtcgattcgttcttttagggattttgcttttagtgttttgacccaaggtcacaaagatttgcttttatgttttctcctaaaagttttatagttttaagttttacatttagatttacgattcatttttagtaaatgttgtctattgtatgaggtattgattacagtttatgtatttttcacatattgttccagctccattttttaaaaagactatgcttttacactgaattgactttgtacctttgtcaaaaataaattgactacatatatgtgggtctattgctgcactctctattctgtgttctgtggatctatttgtctgtcttgattggtgtcttgattactgtagctttataataaacctggaaatcaggtagcgcaaggcctcttgctttgctcttttctttcaaagttgttctggctattctatgtcctttgtatttctgtgagcatgtcagcatcaccttttcaacccatatgcctgctgggattttgaatgagtttaccttgaatctagatatcgaaacaattagctgtcttgatagttattgtcaccgttttataccgaagaaactaggcatactaaagtaacttggctaacatcacttaccttgtaagaagtagaactgggctgtttgacatcagagcttattctttataccatttcctatgttaattagaatacaatattaatttcataaaggtaaaggcatatctgttttgttcctatttgattccttgtgaaagcacaatgcctagcgcacaatagacacttaaacttatctgttgaatggacaggtgaatgcttttaaagtctttccatatagaaaattaagtttcattacatttgacttgatctaggttttcatttcatagaatggagagcagactctgtaaatattttgccccagacctagctttattacaaacattgtcttaattaggattctgtctacccagaatagaaattaactcaagctagcatgagtgtatattgaaatttatattaaggataaaggaatgtctcatagatcccactcaaaagaaattagccagcccttaggaagagactggaattgggtttggaaaatacaataggtctttctttttatctgtagtctttagtgagtcttcctcatttttctctctgaagagataagcattctctgcatatatatagcattcttttagattttcgtgacataaagtattatttaaactttcataaggtatcttgattttaagttgtaattccttgagatgattgttttctttattgttaatatgtttcccttcctgtttttttttttttcttttttcttttgtttgtttttacagaggtaaataccggattgtatacgtaactccagaatactgttcaggtaacatgggcctgctccagcaacttgaggctgatattggtaagtgataaagaaagatctctgtaaatacttactgagttaatatttaaagttaaacctatggatggacactggatttcacttctgttaaagtttatttcaaacattacttcctccaggaaatctctgactctctaacttgctgtttcacctatcttatcccatgatactctataattccttttgctatagaaattaggctctgttatcataattacctgtttatatatctgttttcttctgctaggctataaacttttcaagggaaaaatatcactttttaaaatttatgtttccccagtgcagtgcttggcatataggcacttaaacatattgttgaatgaatgttgaatcctaggttctgtgaaattttaatttacttgtttttcatgttctgtatctaaattaagtcagtgtagtggttttgtaccctctttgttcataagaatcacttttcaaactttaaaaaaaatgtaggtaaccaacacccaactctgaaaattctgatttaacaggcctgggttggcacctggcattggtggtttctcacaggtgattctgatatatagcccgggttggaaaccacagtacctttgattagttgccactagtgagtatgatttattacaaaaaccaaaaacttagataagtcacagtttatttcctagaacgtgtaaatatagaattagtcaaaagctgatagcactttttttgtacttaaaaatattttaagcctcagtatagtgagacctcatctctacaaataattttttaaaaaattggccgagcctggtggtgcatgcccatagtccaagctacttgggaggctgaggtaggaggattgtttgagcctgggagatgaaggctgcggtgagccaagatcatgctactgcactccatcctgggcaacagagcgagaccatgcctcaaaaaaaatttttttttcttcttggtggttaggcttaactatccaagaattgcaatcatggcttctattgcaaatgcccctatttcccaccttcagttggcctaaccaaatttaatttttcaatatcatatgatctttttgtataattatgtattcaaataattccagataggttaggttttcgaattgcaacgtctcatttaatggttactttcatataactgtaggaaagcatttgataatttttccaacaatgtaatgaaaacaaacttgtatcttttttattatgtgttaaaaccaacaaaagaatgagggcagcaattaacatttcattaaatatattagcaatgagtacatttatgagctcttaaactcccttattgacatactgtattttttgcctttaatggacaatgaatttgatatgtttcctaataggttgtatgaagttattgtgaatatttcactttggattaagaataactaccctatatataaatttcatggttgtattgcaaaagctggggtctatgtccatagtggtttgggtacgtttttactatttgctttgtttctgtgatagtgttaaatgaataataagcttaagtatttaagcaaatacttaatacttctgacaagtagttagaactctctatttttgtttttttgtaatggatgagttatggacactgcaattattagagcagcgtactttgcttatgatggatgaaaatgttctctggttgactcagtgttgaataaaaagggatacatgaaataaaaattatttttgaaatattttcctttgccttttgttgcgggaaattgtacaatgcttgcaaaaatgaatatacgcaggatattatttgtacagcagtctgacatttagctaatcagattcctcatttttaggtaaatgttaaattacttaagtagtctggatttttaacagaaacagcaaacatagttttatagggaggctccttaccaaccagacttttaacttaagtgaatgttggcaaaagcttgtctaaactgatttccagggataaggtttagctccattaaaagctagtttgtcaaacctgtaactaaagctttttaaaaaatgaaagttttaaaagagaccatcattctgttttaacctatttaatttaaaatctgggctgaagtaggagtattgcttgaacccaggagttcgagaccagcctgggcaacacagtgagaccccatctctgaaaaaaaaaaatgagctgagcatggtacctgttacagtgctagttatgaaagaaagaaagagagagagagagaaggaaggaagggagaaaggaaggaaggggctgggagtggtggctcacacctgtaatcccagcactttgggaggccgaggcgggtggatcatgaggtcaggagatcgagaccatcctggcgaacatggtgaaaccctgtctctactaaaaatacaaaaagaaaaaattagccgggcatggtggtgggtgcctgtagtcccagctactggggagggtaaggcaggagaatggcatgaacccgggaggcagagcttgcagtgagccgagattgcgccactgcactttagcctaagaaaaggaaggaaggaaggaaggaaggaaggaaggaaaaatcagtcactcactcaggtttagtttcaaaagccaaaacagtgataatattgaattttttccagccactcagtagtacccagagaattttgatacaaataactgactttgaccccatgtttagtaggttttttttttgtttgtttgtttgttttttttttttgtctttcttctccacactctcttaggactgttgtagcttgtaatgttagtgaattgtaattgtttatttgcatgtctgtctcctcttttagaattgtgaactcctcaggtcatggattgtattttattagtctttttattcctagaaaagtgtttggataataatagatatttattaaccataataggagtagtagcatttttgtgtgtgtgtgccaggccctattttagcattttatgtgaatgatataatttaatttttagagcatctagaaaatgttaggtaccattattatccacattttacttgtgagaggactgagacttggaaagcttaagtaacttgcttaaggtaatacacatggcagatggtggagccaggttctgcatctgggcagtctgactttagagctttttaatcatcctcctcctagtgtccgaacattattaatgctcagagaagtatcaaagaatgatgatactcattgagggaaaaaattattcttaagtatcaatttgttaattgaggacaaaagcactactgttactactgtgaaaaatctgaaaacattgtcacggatgattttacaataacatccttttctgacatgcattacaacacactattgattccgtttcaatgtttgtgtctggtatgggggcggagtagagaggctactacaggaagaaagaacaaataacatttcttcttactactttgtgcatcatgtgatttagctcctcccataccattttacattagaaaatgtggctgtcctcctgtgctctagtactggcatttcagaggactctttgcaatatgatatgtgatcaatcatggatggcgatgcagttaatttcagtagaaatttgctgactctttttatctcttttaatagctaatgcatgagataaaattgaaggtattaccaaggagaaatgcaggtggatagttttggaggcaaagtcacagtaagcaattcatctctccaaggaatagtgatgaaagctgagatccaataaatgtcttgtttggattaatacataaatatttccttttaaaattcttaaggcttttattcatatatctcccctctccctatttccaataatgatttttggtgttaatatgatgatatttatgcttctgtttttataggaaccaaatactttgatttggttatttattctcctttggagatgtagatgagtttattttttcctttcgagctttatcttttcctttatgtgtttttctttttttacaggtatcacgctcattgctgtggatgaggctcactgtatttctgagtgggggcatgattttagggattcattcaggaagttgggctccctaaagacagcactgccaatggtaagctttgccaagtctgatgtcccgaaattacattcttaataaggagagcattcaggattggggagtggtaaagaagctgaagacttcactataaaagagcaaatggataatgtaaaaagagaactatttttttaaaaatgctaaagttggtatataatctattgaggaatataatagaacaaggcttgacaaaccttttctgaaaggaccagataataaatatttcaagctttataggccacatgtagtctgtatcacatattcctctctctgttttttcttttagtaaccctttaaaaatataaagagttacatttttcactggtgggccataacaaaacaggctgtgggccatatttgtccgaatgtcttctcagtgatctttcatccgtatgtccttttactctaggatgctgtgaaatcctggttaccccttcttgtatcacattgaaaacctaaagtttgaactattctatagaaattttattaaagcttttggtattagaatttccctttcttccctaattataaaaaatagcaaattttggccgggcatggtggctcacgcctgtagtcccagcactttgggaggccgaggtgggtggatcacctgaggtcaggagttcgagaccagcctggtcaacatggtgaaaccctgtctctactaaaaatacaacaattagctgggcgtggtggcaggtgcctgtaatcccagctacttgggaggctgaggcaggggaattgcttgaactcgggaggtggaggttgcagtgagccgagattgtgccattccactccagcctgggcaacaagagcgaaactctgtctcaaaaaaaaaaaaaaaaaaaaaaaaagtgaatttttacatgaatattctacatgattggcatatttacatgaatggtttaaaaacccacaataatagcactgttttattttttattttgaaaattgtagattcacaagaagttgtaaaaaaaaaaatacctatatagaggtcctatgtacctttcatccagtttcctgaacagtaacatcttgtgtgactatagtacaatatcaaaactaggaatatgacatttgtacagtatctagagtttattcctatttctctagttttgtaagtactcttttgtatggcatgtgtattgttctatacagtttaatctcatgtacatttgtgtaactaccactgcagtcaggatgccaaatgttcccttaccacaaagctccctggagctgttcttcccacccctggccctagccactggcaaccacaaatctggtctctatctctaaaatattatttcaagaatgttatatacatggaatcatgcaatttgtcaccttttggaattagtttttttcactcaacataactaccttgagatctatccaagttgtttgtggtcatgtgttgcctaacaacagggatatgttctgagaaatgtgttcttaggacattttgtggttgtctgaacatggacttacacaaacctacatgataaagcttactgcacacctaggctatatgatagagcctattgctcctaggctgtaaacctgtacagatgttactgtaatgaatattgcaggcaattgtaatacaatggtaagtatttgtgtatctaaacttatctaatgtagaaaagacacagtaaaaatacagtataaaagataaaagatggtatacctgtatagggtgcttcctgtgaatggagcttgtaggactggaagttgctctgagtgagtgagggagtggcgagtgaatgtaaaggcctaggacattactgtacactactgtagactttatacatattgtacacttaggcgacactaaatttttaaaattttctttaaaaattttctttcttcaataataaattaatctcagtttactgtaactttaattcataaacctaaaacattttttgactttggactcttgtaataattcttagattaaaacatgaacacattgtacagctgtacaaaaattttttcttccttgattaatgcattccataaggctttattttaaaattttattatttttatttttaaaacttttttgttaaaaactaaaatacacacatatcagactagacctacacagggtcaggatcatcaatgttgctgtcttccacctccacgtcttatcccactggaagttctttaggggcagtaacactcatggagctgtcatctgtgataacaatgccttctcctagatacctcctgaaggacctgcctgaggctgtttttcagttaactttaaaaaatgaatacgtaggaggagtatactctaaaataatggaaaagggtataggtaaatacgtaaaccagtaacatacttgtttattattcatcaagttatatactgtatataattgtatgtgctatactttttaatgcctggtagtgcagtaggtttattgacagcagcatcaccacaaacgtgagcagtgccttgtgctaagacattatgctggctatgacatcacttggtgataggaatttttcagctccattataatcttatgggaccactgttccacatgtgctctgtcattgacagaaatgccgttaagtaccacatgactatttttcggtggtctgttcctttttattattacagagtattccacagtatggttgtaccacagtttaactgatcacctgttgaagaacttttgggttgttttccagtttttgactattatgaataaagatgctatgaacatttgttcatatctcaaaggttctttatttttttttatttatttttctttttttgagacagtctggttctgtcaccctggctggaatgcagtggcgcgatctcggctcgctgcaagctccgcctcctgggttcacgccattctcctgcctcagcctcccgagtagctgagactacaggcgcccgccactgtgcccggctaattttttgtatttttagtagaggcagcgtttcaccgtgttagccaggatggtctcgatctcctgacctcgtgatccacctgcctcggcctcccaaagtgctgggattacaggcgtgagccactgcgcccggccttcagagattctttaatgggtgaatggttaaacaacctgaaaatataaaagttttcatttctctgggataaatgtccaggagtgtatttttagtttttaaggaattgtcacaaacctgttttccaaagtggctgtagcattctacattcctgtcagcagtgtgtgaatgatctagttatccttgccaccgtttgttgttgcaactgttttttattttagccatttcgataggtgtcgagtggtatctcacttttaatttgcatttctctcatggctaatgatggtgaacgtcttttcatatactaatttgcctctggtgaaatttcttacataattggagtgcttgtttttttctgttgagttttaagagtttaaaaaatacattgtagatatgagtccttggtcagatacgtggtttcaaatatttctttcactttgtagcttgccttttcattctttttaccgtgtctttcacagagtaaatatttaacattttagtgaaatccagtttatcattttttcttttatggattgtgctcttcacctagccctagatcctgaagattttctcctgtggttctttcctaaaattgttacagttttatgttttaagtctgtgatccattttgagttaaattttgtataaggtgtgaggtttaagtcaaggttcattgttttcccaatagattaaattgcagcagatcctttgttgaataggctgtccttcccctgttaaattgcgtttgcccctttgttgaaagtcatgtgggtgtatttgtgtgggtctatttctgggttctctagcctgttatattaattttgaacgaataaagttggcttatgtttaagttttcttggtagtagcgaggcaatggtgccttctgagcccaggatttcacaattttgtgagtaaactgtgttagaaattgtttgttattcttttggtaggttgtctagttcaatttcattgctcattaatcttgcttatagatagcaaattgagaggcatctcaaaaatagtatcttttgttagcttatctcacagagtttggttggagcagatattaaaacaacaaaccaaaaataaattaaatatactagttagcaagtttatattgagggaaaatcaaaccatgtgaattgagctccaatgatgtggctggccttgggtcagattttagtatcatggttcaacaaggtagctattaaaatcttcatactttttcttgaaataattctttagtagtcacataggacagcacacactcatggatttcttctttccttactgtctctttattctcagcctcctgttccttctcatctccctgaccttttaatgttggccttccagaaactttagtctttggacctacctttgcactcattttcttggtcatttcacccaacatacagttttatgttattttattttttttatttttgagatggagtttcactcttgttgcccaggctggagtgcaatggcgtgaactcaccttactgcaacctctgcctcccgggttcaagtgattcttctgctcagcctccccagtagttaggattataggtacgtgccaccatgcctagctaattttgtatttttagtagagatggggtttcaccatattggccaggctggtctcgaactcctgacctcaggtgatccacctgccttggcttgccaaagtgctgagattacagatgtgagccaccacgtccagcctacagttttaaatatcaagtctatactgaggactcccaaatttttatctccatcatagactgatatcagcagtatatgagtgattcagttgtttttgcctctttgccagcatttggtgttgtcactattagttcattttagccatttaatagaatatatgtacatatatatgtgtgtatacacaggcacacatctatataactactcaacatgcctctggtgagatgaccaacaggtatctcaaacttaacctcttcctaattgacttctgcatagcactccagatctgctctttcctcactctcctccatcttgtttaacagcagctccattggccaaaattttggaattttcctcaatcttttctctttttcttacactccactgtttatttaaacagtaaggaaatctcgtgaggtcttcagaatatatgcagaattaaatcacttctctcttgatccctgccattccccaggtacgggccaccatctccttagggcctcctgctttcactcttcccatccctcattctgtttcaacacagcgtccagagtgatactttaaaaatgaagtctgatagatcatgtcttcggctcagaaccatctagtagcatgccatttcattctaaataaaggcaaaagtccttatgatgagttaccgatcctcatgtaatctggccttccattttccctctgatctcattctctactggtctcctcattcaccggatgcagccacaccaccctccttgtttttcttcggacattccaggcatgcttcagtgcctgggctttgcgcctgctgcttcctctccctgaatacgtttcccccacattgtctataggatgttctcccatacttctctcagatctcttggatttaggcctcctgggccaccatatttgaaatatcagattagttccccctcccccatcattcagcattcctcgtaaatctttgctgttttaaaaatagcactatcactgtctaacttactgtgttatattttgttaattttctgtgagttcttcttcactagaatattctttgtagggaggagtttttgattgtttggtttataaaatctggaacaatacctggcttataggaggtgctcaatttataatggggtgaatgaatgaatgaatgatgatgagaaagctgagaatcagtaaagtgactttccaaaacaggtagtgggcagtatagagttgggccataaatagctgcaccatacaacatcctgctagtttctaaagcaaatgatttgaaagaggcataaaacataatttctgccctcaggtagctcatagttcagtaaaggagtttagattcatacctataacagtagaagtaatagcaccaaatgaaatatggtattatgaagtggtacaaataatataaaaagatgaacagtgttagtagtacatgtttagaagggatttctgtggtgaaagtcactaggcacagtgcacctggaggaccgatttccattaatttagaatggtttaaagtaagcttttggaaactaggaagattactttctgtaatcctttcctaggcctttgattctagaaggattgtgttaaaggagttttaaatattttatacagttcttaaacattgttaagcttgaattaaatcttttattatgtctggccatggacgtcattggatcattttcatttcttgggaggattaataaagcacattccttctgttgggcctccagtgcggggagggtgttggccgagcagtggctgagaaaacgtttttcccctggtgttttcaagaaccctctttattagctaagtggtgagacatgccacctggtggttatagtagtatcatttttctcactgttcttggtgcttttcttctcgttctgattccagttatactaggacaactgctataaacctggaatgtttcacactatattatttcagtaatttcaaaaacagcagaaatcactaagctgtttggcacaaagattcctatttggaaggaatcagacaaagtgagtgttgagaaagaacagccaggcagaaagctttgcatcagtcttaaagttctttacatttcaagtaagaggaattgtgaaatccataagacatgtggggtttttctattactttctccccagtatctattacaaagatcagcacatagtaggtactcagtaactatttagaatgagtgcatgaatgaatgaagtatgtgtgatgttatggagtacaaagttagaattagcaacatgacctgaatttagaagcaggtgggatacttatacttttctcagtctgtgggcaccacaccattgaagtatatgtctaagattaatttatatttggttgtttgatttagcaaaacttgctgcctgttaaaaaagaaattaagacctgtcaacttaaagaatacattttgtgagttaagaactaaatgacagtataatttattacccaaagcagtttgcttctgaaaattaaagagttcaagctattaataattatgctgtgactgcaggcataaactgggaatgtcctggcaaatgaggatgtattgtcacctttctcagcctgcctgtgtgttgtttttaagcttcactctagtttatatattttaaatgtcataaaataccacatacttataagagaaaaggttctattcattgctgaagtggaagcttatcattaatttttatttatttatttttttttccagttttggaattcttattactttgaacccaagaaccactgataactagcacaatccagtgaaacagaggaagcagcagcttaatcaaaggaaaaatacatttaagattataagtctggttataagcttaaaaagtgacccagaaagggatatcattgctaaaaaaaaaaatccccttgtgacctgggtacattttgcaaagccacaggtttgcagtgttacacaagggccaaaggaggccatgagttgtctttggttgtggggccggagggtaactgttcatgaaaatagtgagtgtctgaagattaagaaaatcatgctgcagcagaggagaagggagaggaaggcaggaagggaaaggagatgcctgagggtcaaaagctgagcccaagcctaagcccaagctcaagttcaagccccagcatggcacaattttgtgaattaactcaggctgagttgcctccagtctttggaatgtcatcttatactggtactgctgaggcagagggcagtaattggttctttgggataggagaaggggcagttgctgaaatacaaaattaatagtcagcatcccaagttcctcaattgcagccaaaatacatgtgttcaggcctttcggcagtaccgcccccagaactaccagctgtagtgtggtctattcccagacagcaacatgcaagaataagtttacaatacactcagcccttgtggcttaagatcaggggctcagaggctgtgacaactcatgatgctgaaaatgtatccaatgaaaacgaagtactagcttgtttagtagtaacgaagtactattaatttttaatatagtctgatactttattttctaattgtagaagcaacattcttagctatatctttctagaatgttgaggcaaaagagtaaatttatagtgattttcactgttaccagattgctggaatagggaatttctggtagcaagatgggaatttttaagttggaagggtctaacacatcatatagccgtctccatctcattttttttgctgaaaaaactgagcccttgcaaatgtcagttgcaaatctgggagtagtactcatgtctctgaagttgttatatagaattctttttatttattttaataacaatatttatgatagttgaaactttttgagtgcttactatattttatttcatgcattatgttcagcactttacatgttttatctcacttgatattcacaactttatgagattggcactgttattgtagccattttatagatgaggaaactgaagcttagagagttaaataaagagctcaaaatctcacatctagtaagtggcaaaaacaggatttcagctcaagcaatctgattccaaaacagacttttttcactgtgctgccattcttttgcctggtttttctgttaacttcttaaatatatgtcatgtttcatgcttacttcctcattttcataaatatattacctgctcacttatacattatattgcttagaaacaaacccaaccctgttttcttatggactgtatcctgaaaatcactgtttttaatatgtggttaaacaagtgttttattagtgcatttatataaattatttaaccaaaacacttaaccggtgaaagtgctttactgtgtgagaatgtgcatgttctaagaacctctaatttttaaacctcccttattctcagccttatatttgttaaaacctgtgtgttaacacagatgcacccatgttaggggttaattagagaaaccaacctctttatagattagcttgttcatctttaagttgctaggcaggcactgtaaattcagagaacaatctgattgtaagccacaaatcaatgaaattaattttggggttgccttttaaaatagtgtcacaaaatttaaggataaagaatgcaaaaatgatgccaattatctcatcacattagttttgatttaatttttttaatttgaaaaaacctactcttaaacttaattgatttttttaaatataagtttggagataatttttaattcagtaaagttatagtgattgaaaaagtagtttataatttttaataaattgatcttgttttaattttgagtcatattctagaagtgcttctttgcaaattggtaaattgcacatacatttccacttatatacaagataattgctatggttggtttgtataatagatgcagtgcatctgaagagctattttatgagaatattgtttcttgtatctgtcacgagccaaaaagaatatttttaagaaagttatattcttggtgatagaacagctgataatttagaaacaactgtaagacagtccactttttctgattatgaaataataccatagttaagtgtaatttcctataatagaataaaaacacgagttctagttttaggggaggcatgttgttaccgtaccttagaatttctggaagatgacatattcatgcttttcctgataactgctgagtctcctgctctgtctgccaatccagtcaagaagcctttgctagcaatcaattaataatacgtttcatttatacatatttcctatatatagtatgttattgattatctcagtaccactgaagagaggttatctgggtcattggagctttgcttctagatttgtgaagccataaacctatatatttaaaataggaggccaaaaaaaaacgaccattgctttatatagttagattttcagtgaattgagagtttatcatttgtaattatacattaatcaaatataaggcataatatacccccctgcttatatcagcaccatttcaaatgtaatgttaaaaaataataaatggagaagtagatagctaacaagtaggcttaatttaataagacaaagtaaatggcatttggaaacctcatggatttaatgttttatttaaatgatttctgatttttaaaaagtaaatattgtttccagaaggctgagaaacaagttagtagggagattttttctttgcaaaaaaattttacagttgtgtctttaacattgtaccacaaactgttgtcctaccagtctctttgtaagaaagctatagacatgttgggaatgaatgagctctttcctttttaaaatatcagttttacatcattcaggttccaatcgttgcacttactgctactgcaagttcttcaatccgggaagacattgtacgttgcttaaatctgagaaatcctcagatcacctgtactggttttgatcgaccaaacctgtatttagaagttaggcgaaaaacagggaatatccttcaggatctgcagccatttcttgtcaaaacaaggtaaggatttaatggttgatgaattttggtaatgatttcctttttttttttttaacaacttatgtattttatgttatttacgatttccttctaatgcatatttaacatatttcaaattccacctagttttggttcaagtcaagcatgatgttatataatcaattcagtgattgagactagtgtatttttaaaagcagaaaccaattctcctaatattttaataccccattctgttgcttaaacagggcatatactatttatttttattttttaaaattttacttatttatttatagagacagggtctctctgtcgtccaggctggagtgcagtggtgtgatcacaactcactgcagcctcaaactcctgggttcaagcagtcctcctgcctcagtctcccaagtagctggaactacagtcttgcaccaccatgcctggctaggacatatacttttaatgattgataagtaaacaagcaaacataaaatgactctttcatctgaattctgtctagtttactaattacatgacttcagtcttaaggagcttagaaaaggtcaccttacaaacacagtggagcctgtattgtgttccaaggactattgtaggcgctttctatataaaatgatctaatttaatccctataactgctcagtaagttacgtattattttcattttattgttgaggaaactggcattagtacttttttctgtttattttgtttaaaggcattttaaatatatatgttaagaagttttcaaaagcctatattttactttttataagcctttattttactatttgagacagtgtcttgctctgtcacccaggctggagtgcagtggcgcaatcccggctcactacaacttccacctcctgggttcaagctattctcctgcctcagtctcccaagtagctgaaattacaggtgtgcgccaccatgccaggctaatttttgtattttttagtggagacggggtttcaccatggtggccaggctgatctcgaactcctgacctcaagtgatccacctgtgttggccttccaaagtgctggaattacaggtgttggccactgcgcctggccagtttataattttaaacattaaaataaatgcttcttgtccaatcatggtgtctcacacccagaatcccagcactttgggaggcagacgttggagaatcacttgaggccaggagttcgagaccagcctgggcaacatggtgaatccctgtctctacaaaaaatacaaaaattagctgggcatggtggtgcatgcctgtagtcccagctatttgggaggctgaggtgggaggatcatttgagcccaggatgttggggctgcagtgagctgagatcacaccactgtactccaggctggatgacagagcaaggccccgtttcaaaaaaaaaaaaaaagcttctaccaatacaaacacaaaacaagcatagacaaatagagtttaaagaacatcattggtgttttcctctaaagggaatattgatgctaggccaagaaaatcctggagttattcttgaggaccttaaggaataattgaaatgtaggatttgctcctggctttcttgtcctatattcagaataaaacaagaatggatcgaatatattctgagtgttctggccattctagtgctctctgaagtgagtactcactgtgtttcacttccctttcatcctaaagaggaaaagttcttttgaagaaggctgtttgtcctaggttagagtctccacagtcagatcattatctcctcctaatctttgatcctgttcagtctctatggtactttcccttataataacactctctatggcactttcccttataataacactctcctttttaaagcagtttgccttttttgtgtgtaatattgttctcctggttttctgacgtcctggtcctcttataatcctatgcaaatgtttctttctgtttttcatgttgactctgctaattgaggtctttgttactttttagccgagactattataatttccccaacagatacccctctccccagtgccccttgttgctttctatgcagtttacaaattattgtctgcaaacacatccttaagtctggaatacctttctggaactccttactaggaaataaagaccagactcagtgtaacattcaacagtattgaagatctaggtatttaatatgaatttttttttttaaggagatcaagaaagatttttgtacccatttttaatcctccaagaagacttaggatagcaggaaaccattgagagtcagaatgctttctacagatcttaggtgaacagaaactttcctcttcatgagcagtgaggtagagggtaattaaggcttcagagcattgcccgttatttccatcttcttcccttcctttaattctgctaaattcctttaatttgtttatcagtattcaagtatttttatccattgagctaaggtgtttcttaaactaaccctattttgttaaagtcttaattataatatattcatagtacatttaagtgagatagatgagtctctcatataatttagtggttagattagattagaattttctcccctcagaaaattaagaggaaataaaagtctgtagcaaatcacttggcaaaataatggctccttttgtaataggaatttttactcttttgatttatctgttacataagttcaaatttttacatattttccaccttttttaaaaaagagtgatatgtagtcaatatcaatttgagcaacactgttgcatataaattgaaaaggactccaattttctaattccgtacctcagttgtgatcactgttggtattttggcatttatgtagacttcctttctctgaccctactactgtgcagatatatagttgcagttttttgttgttgttaagttgatacagaaatagttgcatactatatccattatttatgcaaattttttttcatttaaagtatctgctatctttccatatattgcattttcttaaattagagccttaatatataggatattacaatatctaggttttgttgagtagttttttcttctttgaaaacatgtttttaaaataaggtttttttttttttttttttgacatggagtcttgctctgtcgcccaggctgtaatgcagtggcgggatcttggctcgttgcagcctctgcctcctgggttccagcgattctcctgcctcagcctcctgggtagctgggattacaggtgcatgccaccatgccctgctaatttttgtatttttagtagagacggggtttcaccttgttggccaggctggtctcgaacttctgagctcaggtaatccgcccgccttggcatcccaaagtgctgggattacaggcgtgagccactgtgctggccttaaaataagatttttatacactaaaagaaaacttacatttttcactccattaagtagttcactgtgaatttttgatattgaagcccatttggttgctgtcaaaaatagatttgaacagattattcagtatgactcttgtagtgaaattattgccttgtttcctctgcttaagttttcagtggcttttgccacagtccttaaaggttttataatttttttaatgtttaatttttaaatgtttgcttaatatttcttagtatgagtgtagataatgatgaacatttagatgactttttactattataatgttgcagtgaatatttgtttacatttatcttttggccaataagcaaatatttttgtaaattagaatcctaaaattgaaattggatcaaaagttatatgcacttgaaattgattaacttttcctaaatctaaaatagtatagtcttttttatattgtcagcataaatgaatgcacttatgtaaatgaatatttttaggcgttaagtaaaatattctgtggaaattgaacatttaagttgtttatacttctatggaaatcgtttacgcttttaataaagaagcacaagtttctacaaaatacattctaacagatgttttctataacattcagtctcaagattactagtaaatacttctttgaactgtaaaagcaatctttcaatattataagaaagctcttgctttagtaaacatttagaaactcagctttattatcataagcaagaataagaacagtgtaacaagttttatgcacactcctttgtaaaccctcaccagactaattgttaatctggtgccttgcattccccaaagtatttgtatctgtcgtttataagtttttatcaaggtttcagctaaaacaaataaatttgtttctggttttagctttaatttgaactgaaacagtcaaaactgagttttggggacttcacacaattcatttggatatttgattctccataatgttttaaattttcatgcacttaaatatatcattatttttgataggctttcttcctttagtcttttctttagaaggtagaaaggaagaattaaataagataaaaccaaacgggtctgaagcatgtataaagtatatatgtttgctcttttgttcttctttttctttagttcccactgggaatttgaaggtccaacaatcatctactgtccttctagaaaaatgacacaacaagttacaggtgaacttaggaaactgaatctatcctgtggaacataccatgcgggcatgagttttagcacaaggaaagacattcatcataggtttgtaagagatgaaattcaggtatgaggatcaatcatcattgctctccgttgctcatagtggaagtggatatttctcaaatgtttatttaccagatctttattgaatactttctttgtgttgaacataaagcagtccctctgataaatgtgggagaacaaacttgcagattagtataaatagcaatctgtacctagtgcttaggtgcacagaggagggaggaatagctctgtcaaggtagttgtgtaatgggggtggtccatccaggaaaattcaattagagtccaaacatgtaagtagaagtttttcaagtatgccaggccagtaggtgatgaggggaaaggaattggttatagaattccaggaagaaggactagcaggtgcaaagacactttgatatgagaacacatactgggttcaggaaatgtgactggtatggaatggttggagggaaagacaatgtggggtaggaatggcacaaagtatggacaaagaggcagggtggaaccgttagagacttgagagaacagttgaatgggtcggttggccaggttatagatggctttaaaacttgcaaagaagcagtctgggcttggtatcatatacctgttagttttcactgactactttagccttagaatttttagtttagatacaattttctgtaataggtaaaacggattaaagtagaataactctggctgaagttaatgtgagggaaaaggaggtacaagagtctcgtctctagaccttgaagacactccctgttggggtcttataatccttggagtgccgcagaatcatttgaaaaccatcttgatgtactactctgtgtttttaaataagataataggattatagaaacattagactggcagcaataagttggattgatttgaagaagagaaactgaagaagggaaagggtatcgatgcagctattgtgaaattctacagttgagattcctgacctgattggactggctcagtgggtgtcatagaggatttatttgggaggatttaagttcaaggcacatgagtaggtttaagtcaacaacttgacactgtcaacatgaaatccacactgtaactataagtccgaggaagagccctctcctgaagttaggaatttaacttcagctcttgcattttctgtcccaccggtcatccatttcttctctatccatctccttttctgatatctagttgttatcagtgttgttgaaaagcttaagtatgattcatattcactgtctataaagttcactacacatagtcatgctgtaatgcatacccgcctgaaagcatctggtctctcttttccttctttccaaagataagaataccattcacagctgtttagaatagaaattttatccaaattcttcagtgtttatatttttgttctgttatttcagtgtcttgaatattgtcaaatgacatttattagctactactggtactactgaatcttaataatcaatcttcaagccattaactgaccaatggtttcttctatcttaatgtattagtaattattcatttagagtaaaacatctcccagaacatgaaagaatacaaactttattcatgttacgttgtgacaggagactttgttggatgcgcctgattttcctgccaattcacagcttcattaaaacagtaatgctttgaaatatggcttaggaaacttcacaatgatcattaattacacctaatttctggaagagtatatgcatgtatgtgttgcggtattctcccttgctgtggcaggatgtcacaaatttttatccacattacgaaaatttaaaaattgatatggttttttctccctacgttgatatcagatattttgttttatctgacagctggcccaatgtactcctactttgccattataaagaattcaaaagcttcatatttgcattgaaagttctcaaacactttgtaaagatgatgaaagtatgtttcatcatctatgtagaatagtcaggtgttcttgcaattgattacttgctaccgagaattgaatacctactgagtgcataatgtatagaattctagatattcacttttgtgtgtttttacagttgttatataccttagtgtggctctaaaagtggaggtgacagctgtagctcttaatgtcttacactgagtgatgtttagaatcttaaattttcttttataattttagaaaaaagtatacttttctttcttatttttataaccagatccaaacacatttgcatgtagataggcatttttagtcttgaacattcatttttacttttaatcctcacttttattagtttcgtatctttttgtatttcatttcccctttcaagatgccttgagtcctttctttttaggaatgatgttgtgaataaattatttgataaaatgtctttacacctgagagtttataaggatagtttgaaaatcatgtctgtaaaataggttgatctcacctaaaaataataccatataattaaaattagaattattattgtgttgcttattgactcttacatatatcaaaaaattgctgagtcttattcagccagagcttttacttagtatgatattcattcctatatttacttttttctcacctttctcatactttcttttacttactcagcattttcctcctttcctccctcctttcttttcttctttccttcttttctcttcctttcgtattcctggtccatcttagcatgtaatctttctttatgaaatggcatgcagataggtctactgttcttacagtaaaaaacttcaaggcctcatgtctttcccacttctgtttcccattcacaacctttttagctgattcttttggtactttaccactatatcttgccatagtttatgtacctggctcctacttaattttttgtttatttgtgtattagtcgtaggcattatttatcgactcttctctctgaaagatgaaaggttagctctctttcacattcttaactgcccttttttcttaccttgtccatgtatttctaaccccctttcctcctaatatgtttatgtcataattttggctagattagtgtatacgatttacataattattactctgtaaatgctttttatgatctctgagccatgtagtatattatggctatttttctttcttatctatttgtatttttattgttattacctaaaaaaaaattttctatgtcttatcactaattcttccctaaaatttcccacaattgtgtaaacttacctcagtatattcatagatatgagacattctatcaattttaccctcttaaagatgcagagataatgcattatgtttcatcccaccatctttaatgagaagcttccatcttagattaatattagagaatgttaaaatactctgcaatcaggtaaggacgcttgaaacttcattataatgcaaaagttttctttaacacaataaatattttgaaccccttttgtgtcttgtattcataggagttcagatagaccactttatttactattttttatagagagtgaacagaaatcccatttctagtcaccagtccttaatctgtaaatcaggcagataatctgtaaatgattggttgaaatcacattgaattccactttgtgccagggacttaagttaacgaacaaattattcttacaaaaaggtataaatgtaaggttttcattctgctaaatatgtttgtcaaactgtgttgtgatttgttctcagtgtgtcatagctaccatagcttttggaatgggcattaataaagctgacattcgccaagtcattcattacggtgctcctaaggacatggaatcatattatcaggagattggtagagctggtcgtgatggacttcaaagttcttgtcacgtcctctgggctcctgcagacattaacttaaataggtaaaaaaaatttattgtttttactcttgcagatttctttctttctttccatataaacctcaaaagtgtttgaggctatttccagtatcccaagtaatttgtgagtgcatttaaagtaaaaaaaaaaaaaaagaaaaataaaacctccccaaatccagaggacatgtaagaagaacatttgtggtaagagttgccacttggagatgagctaatttcagcatgccttagttagtgtgaggaattaactaaatcaggacaatacttgggcctgtcacagagatcctatggaatactttcctaccattgtgcattaatgaacaggttcttttcctctcctcagatcctgtcaagttgcgatgtcttcagccatagttacttcaactaccactgattttgttactgattctttcttcccatgctacagtggtgattattccagaggatttctctcagtccctatttgactcttgttactatttgttttcttggttagttccatgagaccatgccagttctccttgactgtgtatgaatcattgtgttgcactgtactgacagactgccgtaagtcaatattaagtgttcagtatctaagtgcaggagaacctttctacttaagtactcaacaagtagtttgttggcacttaagttctatgagattttttgttgtaaaggaaaacattatcttgcaaagattttggggcagcatttaccaatactttgttccttcatccgtaggaaaaagaatctcaggagaaaaacctatacatggtaaccaatggggctgccaagctgatgaagtattttcagagtacacctttgtgtagctgaataaattgagatcttgaatggacatattagctcattttagtaaaatgataagagagtgcctcccactacagtttttgtttttatgcatcattaaacaatgtgtttttgattgtccactgtgttccatgaactatgctatgtgtgggagatatagtagtaaagaaaagcaaagtacctgcttccatagaattcagtataatgggaatggtaattctttagagaatcacataactatggatacataggcttcattttactgttctccttttgtgtttgaaaatgtcaacaatcaaaattttgtaaaaaaggaatcatgcaacatatttaaaattataactgtgttaagtgtaatgaagggaaattgcactgagtagtaagaatatataatggtgtgtggtatttcccaagttaaaaaggtcagataaggcttccttgtggaagtgatagttcaaatctgaaagaagaataggaattaattaggtaaaaatgtttgatgcaaattttaagattttccttctgagtagtcagtagcttttccttcttaacatagaagatgacaaaaccatcctttttttgtacataacaattcttgttttcctttagacagttgtatctgtcaagcttcttatgatctaatttaaataattgggatagaacacagctgtacatgttactattaaatatggaatatatcaaacataagttgattcctaccagttctgattttatttgtgtattttgttaaaggtactgaggacattaatatccagttttatattgtgcatttgaaggttcatcaataaatacaattcttgtttctctgggtcttaaaagatattttaaatggttatctcattaagatttaacaggaaataacagtgattcaaatcaaatagtggtgccagaaacccatacttgaattttgggtatagacaggttaccctttgcatcaatcctgaggaaactaaaactataggattaatcaggataaaaaagaattgagcaaggattcaggagggatctgtatcatcctggtgacaaccctcttctagaaaaaactagaaagtctaagaataaatgaagttgctggttctcacctggaaaggtcagttactcacaaaatttttagagtctatcttatgccataattctatcactgagagaagaaacttgtccagtcatcatgtaatcttcatgtaaatttatgtttttaattgcagaattcataccacaggcaaagtcccaatgtctgcatttgctgttaccttaaatagtcaaaccccaaagttattgtaatctttttttaacagagaataatttgcagagtaatctcggtccggtagatctttcagtggatccaaatgattgccatgaatggtttagaatttttttaattttcaagttgtttttattctgtggaatactggacttatttttgtagtcccaaaagaaaaataaatatttatttatttgccgttaagagttgtagttttgttttctcaaatttgtcctgacactgacgagattagttaaatgtaggtcatctgaaccaaatacaaggaaggaaggacccagttctgaagagtgtgggcatttcttttcttgtttttttttttttttttttttttttctataggaggggaacgaggtgaactaaacaaacaaaataaagcaaaaaagaactgatttttatcccttgaggtagaaagaatgagattacagtggacccccttgtctgcattttcactttctatgttttagttactcacaaccacgtccaaaatgttaaatagaaaattccagaaataaacaatttataaattttaaatcagtggtggctttgagtactgtaatgaaattttgtgccatcccactcagtctgcctcgacttcccttagaatcatccctttgtccggtgcattcacgttgtatttactccctgtctgttagtcacttgttgcagtatcacagtgcttgtgttcaagtaacgcttattttacttaagaatgaccccaaagcacaagagtactgtgcctaatttataaattaaactttttcataggtatatacatataggaaaaaacataatacatacaggatttggttggtactattctgcggcttcaggcatccactggacgtcttggaatgtatcccttgtggataaggaggaactgtatatggttaacctaggagctagagtcaacagttggaagagactttggggataattacatggaagggcatggtgggtggtcgtttcagatgacaagaatgtttttgaataacggatcatttgtgtcttcagactttccagaactccttgagaattatgcagaggtatttaatcagtcagaaggttgaatagtcaaattattagtgagtgaagtctattttgatgaggattttactaatgctgtcccttagatattataagtaaatcgttgttttcttttgaaatatctgaaacctagttaacatggactttcatttgttcttgtaaagatatgcaaagctatttgggagattgtcatcatctgatatttgatattcatgggctttcttcacagaagactagaaattaacagagtcatgatgaattatggctgcattgactttaaaaaacaaacacctccttaatgttatttaacaattttgaataaatttgatatggcaaacaaatcagttataatcgattgagaaaggaacttaattctaatacttgactggtgtcccataataacccataatactaagagacagttttggagggcgagaagtcctgaagagctgatagagataaaggttcaaatttgagcttctttcagtgttccttacgtcaatgcttttagtttctcatacaaaataaaataaagaataacctttttactgggaaaaggtaaaaattaataaattgtagaagcattgtttgaagccaaaaagtgtgtgacatgtaaattgaaatgaaaaaccttagagtttttgatactttttcaaagcagctaaagaattgatacttggacacaggaagaattttttttcaaaagcaatttttataaaatcagaaaaatgtttacctcttgttgggggcattgactggaaaggaatacaacagaactttctgagatgctagaaatgtttttttatcttgatggggtgtgggttttgtagataatgaaaaataaacagtaaaaaataagtaaaaaaaaaagtaagaaagttgccaatacagttttacatattcctgtgatgtttttaatcgacaggcaccttcttactgagatacgtaatgagaagtttcgattatacaaattaaagatgatggcaaagatggaaaaatatcttcattctagcagatgtaggagacagtatgtattatttattttatgccaatagtatggatttatggatgatgctcttttaagacaacaatttggctaaataattatcagtattttgaaaaaatattttgttgctgttacatgtgtgctgaatttttaaggctaacttctttgtgtctgagtaaactgaagtcaaataatgaagtcccaagtgaatcaattaatggtgattttacctcattattttcaggaatgaacttaacatatacgtttctgttcttttatttaatttaaaattttgtcttgggtagaatcatcttgtctcattttgaggacaaacaagtacaaaaagcctccttgggaattatgggaactgaaaaatgctgtgataattgcaggtccaggtaaagatttcttattatagatggacattctaaaagtctttctttctcttccttttcatgtttaactgaatttttgttgaatgataagtatttcagttttttaaacaaaacaatgaatgtgtttagatatgagaaagcaaacaatattaaagtattttgcttaaaaaatagataaagcaataaaatggtagccctaaatctaaacatatcaatagttatgttaaatgtaaatgatctaaaatattatttaaaggcgtaaattgtaagaattggtttaaaaacatgaccctgttctgtacgttgtccacaagaaatccactgtaattatatagataggtttaaaaaagaatgaaacattacattccatgaaaacattaatcaaaaggaagttggagttactttaatatcagacaatggacactttggagcaaagaatattatcaggataaagaaggatattatatgatgtaaaagaatcatttcaccaatgtatcagtcagggttcaccagagaaataggacgattgatattatggagatatatatatatatatatatatatatatatatggggagggaaaggaagaacaaatatggggagagagggatgaggcgactgattttgaagaattagctcacgaaattgtgggggttggcaagtctgaaatttgtagagcaggtcaataggctggaaactcaggcaagaggtgatgttgcagtcttgaggcagaatttcttctctagcaaacctagtttttgccctttagtcctgccactgagtggatgaggcccacccacattattgacaataatctcctttacttaaagtcaactgattataaatgttaatcacgtctacaaaatattttacagcaacatctagattagtgtttgaccaaacaactgagcatcataggctagccaagttgatgcataatattaatcatcacaaccaagaagacatcatcctaaatatatatatatatatatatatatatatctacttaacaaaaagactgacagaactgaaaggagaaatagagaaatctacagttacatttggtgacttccagcatctctcaataatcaataaaactgacagaccaaaaaatcagtaagaagacagaagaaatgaacaggattatcagcatgctggatctcattgacctttttagaacattctacccaacaacagtagagtacacattcaagtgcagatgcagtattcatgaacatggatcatattcagagtcataaaacaaaccttaacaaatttaagaatcttgtatttgtatattttttgactagaatggaattaaactagaaaacaataacagaaagataacagaaaagtctctaaaccttagaaattaaataacacacttataaataaatccatgagtcaaagaggaagtctcaaggcaaatcagaaaatgttttgaactgaatgaaatgaaaatacaaaatgtgtgagatgcagctaatgcaatactgagaaggaaatttatagcattaaatacctatgtaataaaagaagaaaggtctcaaatcagtacctaagcttacatcttaagcaacaagcaaataagagcaaaataaatcaaaatgaagtaaacataaggaaataacaaagaacataagtcaatgaatagaaaagctatggtcataccactgctgtccagcctgggtgacagagtgagaccctatgtcaaaaaaatttaaaaacaaagcagcatgcagcattcattgtcagtgaatagaaaatgggaaaacaatagagaaaatcaactcaaaagctcattctgtataaagatcaacaaaattgatataaacttctaacaagactgacggaaagagaaaagacacagaagaccaataccaggaatgaaagagggaatttcactacagacctcccaggtattactagggatgataagggaacactatgaacaactcagaacataactttaataatttagatgaaatggatcaatttcttgataatctcaagctaattaaacttacagtgaattagataacctgcatagtgttacaaccattagagggattgaattctatgttaaaaatctctgaaaataaaatcccctagcccaaagaatttcaatgacaaattctaccaaacatttagaagacaaaataataccaattctatagcatgattccatttatataatagtctttgaaacataaaactatactagagggatgaagaaaagatcagtggttattagagattgggggagggagaaggtatgattccaaaggatagtacaaggcagtattttggagtgatagatttatcgtgccctgattgtgatgggagttagatgaatctatggatatcttaaaatgtgtagaactttacacatacatacaaccaatttgcctatgttaattgaaaaaataaaataaaaacaaattatttacctggtgggttagctacgtacctaagttcaatagctgcgttactgtaagacaaaagaagcattattagggatggagttgttctctgtgtaatgacaaatacttcttcactaagaagacagaattgttttatgcacctttaaaaaaaaacaaaaacaaaaaaaatacaaccaacaaacagtaacttgctggtgcggtggctcacacttgtagtattagcactttgggaggctgaggtgggaggatcacttgagaccaggatttttaagaccagtctgggcaaaaaaccgagactgtgtctctacaaaaataaaaaataaataaaaaaaattagctaggcatagcattatgtgcctctagtcccagctactctggaggctaaggtggaaagatcgcttgagcctggaaggttgagactgcagttgcagtgagccatgatggcaccactacactccaggctgggcatcagagtaagactctgtctcacataaaaaaaataataataatgataaaaactagtctgggcatggtggctcacacctgtagtcccagtcctttggaaggccgaggcaagagaattgcttgaacccaagactttgagaacagcctgggcaacatagcaagaccccatctctatttaaaaaaaaaaacaaacttaaaaatccagcaaatacataaagcacaaagccgacagaagaggtggagaaatcaacaaatccaccatcaaagtgggagaatttgatataattttaagttattggtagggtaaacaatccaaaaattagtacactgtagaaaatttggtcaacatagtaataagtttgcttattactatttatcagtatacatagtatactgatttatcagatacatagtatatggagccctagagcaagcaactatagcagtgtatctcaagtatttttacttcatgacccacatagcaaatgatatgtgtatataacacactgggctaattgtcagagttcagtttctgtccaaaaccctaagatctggagtgattaacctttcagcactcttagaactcacttgtttgtagcacactgattgagaagcactgaaagacttcactcctcaaacatacatggaatatttctaaaaactatgtattgggccgggtgcagtggctcatgcctgtaatcccagcactttgggaggccgaggcgggtggatcccgaggtcaggagatcgagaccatcctggctaacatgatgaaacgccgtctctactaaaaatacaaaaaattagccggatgtggtggcgagtgcctgtagtcccagctactcgggaggctgaggcaggagaatggtgtgaacccaggaggcggagcttgcagtgagccgagatcgcgccactgcactccagcctgggcaacagagcgagactctgtctcaaaaaaaaccaaccaactgaacaaacaaaaaaactaaaaaacaaaaacaaaaaaactatgtattagagcatgggttggcaaactatggcctgtaggccaaatctgcatgctgttttatttttttttatttttttgacatagggtcactacaggctgtcacacaggctggagagcagtggtatgatcatagctcactgtaacctcaaattcctgggctcaagcaattctcttgcctcacctcagcttcccaagtagctacaggcatgcactaccagacccagttaattaaaacaaatttttttttggtagagacagtctcagtatgttgcccaggctggttttcaaactccttgcctcaatcagtcctcctacttcagcctcctaaagtgctgggattataggcatgagccatcacgcttgactaatgtttttgtaaataaagttttctcagaacacagccatgccttttgtttatgtgttatgtagggctgcctgagttaagtagttggctgcaaagcctatcatggcctataaagcctgaaatacttactatctggtcctttatagaaagtgttttctgaccctgtactagactagcttgtctcaaaattcttcaatgaatttggaagttttctcaccacattttctgaccataatgcacttgagttagaagtaaataagcagataaacaacaaaatcctcatgcatttggaaattaaaaataacacttaaataattcatattcaaagaaaaaatcaaactggaaattaaaaaaaattttaaacctacagataactacattaatatgcattaacatttttagaacttagggatagttacaatgatatacattaaaactggtaagaggctgggtgcgttggctcacgcctgtaatcccagcactttgggaggccgaggctgggggatcacgaggtcaagagattgaaaccatcctggccaacatggtgaaaccccgtctctactaaaaatacaaaaatcagctgggcgtggtggcacgcgcctgtagtcccagctacttgggaggctgaggcaggagaatcgcttgaacctgggaggcggaggttgccgtgagccgagattgggccactgcactccagcctggcgacagagcgacactcttgtctcaaaaaaaaaacaaaacaaaacaaaaaaaaaaactagtaagagggcccagtggctcacacctgtcattctagctctttgggagactgaggagagaggatcagttgaggccaggattcaagaccagtctgggcaacataacgagaccgcatctctacaaaattttaataacaacaacaaaaaaaactggtaagaggcaacattgaatagtactttgtgggagtttattagcttgaaatactcataatagaaaagaaaattaatcagctaagcatctcactaaagagattaggagaataaacctaagcatagtttttttcccccaaacattattatatctggaatattgaatgcattcttattgctatttcaaagatacttactctaaggaaagcaattgaattaggtagttgaactctatagtagattttctttaatgagtccttttgttctcaacctacttaaataattctcatttgaatttatgatagtttcagatctacccaaagggtgacttaggaatttaacttctaaatctatttaaatgaaaggtttataatctttttgtcatattttacagtcgttagcgtttaacaatttatagcataggatttgggtttttttttttttttcattttaaagaagaagtttatttaagcaagacacttgactaagggaagactatcttggagttattattactagagtaatttatttctacttaaagacagattgccccacaagtaacagctacataaaaacagttgtaaaattgtccttggttttacaatgataaatgaaaaacattaaaattctctaattgaacaaggtatgcaaggatttttatattgttttttgctaaaactatgacagcaaaataacatcctggagtataaagataagagctgaatgagcaggccactaggggacaaagggagtcttttcacagaaccaatgcttcttttgcccaccccatctccatcgaagtcaatctaaacatattattggccatttagttaaaaaaagaaagaaaagaaaagcaatatgcttgtggacatacaccagttactttatgtgcagtaaaagagtaggaaggggaaggtgaaagaatagagaaaactatgtagtcaggatgtggtggaaccaaattgcaactttctttttttttgagacagagttttgctcttgtcacccaggctggagtgtagtggtggcccaatcttggctcactgcaacctccgcctctcagattcaagccattctcctgcctcagccttctgagtagctgggattacaggtgcatgccaccatgcctggctaatttttgtatttttagtagagatgggttttcaccatgttggccaggctggtcttgaatgcctgacttcaagtgatccacccgcctcagcctcccaaagtgctgggattacaggcgtgagccactgcgcctggccaaattgtagctttctaattgagactgtcttcttggtctggaagagcagagttctgcagtaaaataacaggtcccccttttagtagacatctccatgtctgctgctggaacacatcagttttgtcttaagcctcacttccaaatgtgcagatgtgtctggttcattgattggctgcctgtcaaattgaaacctgatctgcctcattggcaaaccgtgccccttacaataggctttcattggtttactaagcggtgtggtgcgtggctgttcatcttaaactgcaccacagtttaagatgaaccttcaaatgaacattatccttgttctcagtcttgactttccttgggctttttgtggaccctggtgagtgtggcagtctcctcagctgctgcttcacaaaagaggtaccaggtctgccccgaatgagtgagcccctaaacaggaccaggagtggcagaagaaagaggcagcaactgagatgtgttttttctaagctgaaaggctttttttttttttttttttgcaacacacctttaacactaaagtccaatatttatataattggtcaagtaagtggagctgttctagctataaatatggcaactctgcttgctcgtcctattattgacattattcctttctgtggtctgaggtgcctcccatgaaacttgcttctaggacactaggattgagaaccatcagcgtaacatatctgttacgctacaatagtttattttcatattttagctactttacatactcgggtataatgaactttattcatagcttctgaagcagttggcacatttgagatattttttacttggctaattgttatgctaaatcttttgatttctaaagatacatgcctttgctaagctttcttcaaatgttattatttttatttagattggatcattgctattccatggatgactcagaggatacatcctgggactttggtccacaagcatttaagcttttgtctgctgtggacatcttaggcgaaaaatttggaattgggcttccaattttatttctccgaggatctgtaagtatatatctgtgaattcccttcatagatcttcttttacttctattacacttttcttcagaggtttgcagtattatgattgtagctttgacttcagatgggtgactaggaactcatagagtcttactaagttccagttaaacactacattcattactttggataaaacccgtgtgtatggcatcttctgctgttttcatgttcaagccgatgttcagctctgcagctcagtctggaagcattgtgttaatttatcacattgcatttgggtgaatccctagactagtcttgcttaggataattaggaaaagttaactttcattgtatcaagggacaggtagaacaaaattgtccttttgtccaggaaaccattaaattcttcaaggaaaactttagttatagggattattttttaaatgtctaatttcagtaacaatatttgggacatatttatttttccttctgtttcctatcagaagtatttaaagttataagaaaattgtggtttttgcctttactaatgaataaataatcaattaaattcagttacttttttttggagtgattgatgttccagtattcttctaaacaaccacgggtacaaatgtgaataagataggaccgttgcagtccaagagcttgttctgtagtcctttcctttatatgattttttcccctgatttagaagtctataaagcaaagctaagtattacacactgataatggctgaataaatcaagagcaagagataggatactttgcaaatatgcatatttattaaaaatgtactttaaaatagagattaaaattctcgtattgaatgtagaataggtaagcatttatttgtgaaatactcgaatgcttcatgtaaatactttctgagtttgtatttttagaaaggaacattttggaggctgaggcaggagaatggcgtgaacgtgggaggcggagcttgcagtgagctgagattgtgccactgcactccagcctgcgcgacagagcaagattctgtctcaataaaaaaaaaaaaagaaacatatttattaaattagttgtgaaatatttttaatgaaatatattgaaaacttctgttgatttttcatgtactgatgtttttagattctaaatggagtttaaaattttgtttgtaaatcacaagttggattagaaatttaatagtagaagtgttgcctaaggactattttaggtgctgtgagtgaaactgtattttttataacaagaattttagttgtaagggacagcttaaatataattgagatctgtgaaaatgtattctgtctctatcaccttcagaacctgtgtatctcagttgaatgtataatttataaaaattattcttgttttaatttggtgtaatccagccatatccagtatcaacaaataagtctaagtaggctccttgacaaacttgaactggccacaagagagatcagatttcacctattaaaaaaccaaatcagaccacttacactgacagtctcttctgggagtcctcaaattaagaagtctatcctttgtgaaatattacactacccttgctagataaaacttttctaaaagtaccacttaatgaaaatctgtagacactaaatgcaatgaaaataaggcattgtttttttttctccccatttcagtgatcttggtatcctgggatattgtttttaaaattatcgttataattcctttgagaatttagtgaaatgttccctttaaccaacttaggaaaaattaatatctttgtacatgattttgagctgtaaaataaacattttaaactgggaataattggagtttagttaaagagataatgtatataaatatataacatagtagcagcatataattctgtcttacacaagatttttctgaatagtataaacagttatgtagcctatctaggagtttgtgaatagagtttaaaattttgttttgaagctgcaaatttgattagaaattaaacagtgaagttattacttaaggaacttcgttttagctgtctgaacaacttactgtataaaaatctttaaacattctgtataaatatgtgataagatatgcaatgaccttaattttatagattagaaaataaaaacacactcattaatttacataactgacagattaagtgaaacttctcttctgatcacgttagcagaatgccaaatcttgtcgtggcactagaattagacggtagttttgataatacatgatttgactatagacatttgttgaaactattggtagttttaatcactcttgtaattttcaaactatctaacgggagaggattatccatcctgttttctagacaaactgtttcatctgaatgaaatatattcctagagataattatcactacttcatcttttggttttattttgcacatagaattatagttcacaatgactttctgaagctctaaagttgcagctgtgagcttctttggcctgtagggactgggaaaaagcacccccgtcctcccccaagcccccccaccaaaaaaagttaaagtgtttttaacaatagctgtgggctttttgtagtttcagaacttaggagttgcccaggctggaatgcagtggtgtgatcatagcttgatgcagccttgaactcctgggttcaagcaatcctcccacctcagcctccagagtagctgggaccacaggtgccaccccacccagctattttttttattttttaatttttttgtaggtatggggtctccccatgttgccctgcctgtctcaaactccagggctctcaggtgatacccaccacccttggcctcccaaagcaccgagagtcactgtgccaggctgagtttaaaatttcttgagttggagtttatggctattttttccactagttattaaacatgtatttttgtataaggcactgtattacattttgtggggggattcaaagctaaattagatgagacgcatcatctattatggaagatgttacttaagaagaaatgagtgtaatgtagcagagaattagataagggacgtatgaatacatataaatgctgttgaagttctgaagagagagagtgtttagagaaattagaggagtctttgtgaaggtatcactagaacttcctatttttgtggaatatatagtagattttggtgtgatactgtggatttggacattcactcagagaaggaatgagggaagaatggtggagaagaatggcattcacagtacaaaaagcaactgtgacttttaaagaagttaatatggagaagtggcaagtcttttcttctctcttctcttctcttctctcttctttttcttttttctttttttctctgtcagataccgttgtaaagactttgcttttaccggaaactgatacgttgggtcatgtaccctggccagtcagttctctttattctaacacttagccgatcagttagatttccacattccatgatatgtcagttttggtgacccttatttttccacctggtttataaagggaaagaatgtgatatgtcacccaggctctggagtacagtggcatgatcataggtcacagcagcctcaaagtttccagttcaagcgatcctacttccttggcttcctgagtatgtggcactacaggtgcatgccaccatgcccagctaacttttttgtagagacagggtctccctatgtttcccaggctggtcttgaacccctgacctcaagtgatccgcccaccttggcttcccaagatattggcattacaggcatgagccactgtgccggcctgaaaatttctcttttgagatggcatcccacagaagtatacctgcttagagctaacactggtaaaaagactatttaaccctattgccttattttactgtagttgagattgagttaaactgaaagctgaatgacctgtcctaggtcatactgttactttgtgccagagtcaggatgagcaaatggatttcctgcctgctagtctagtgtcttttctatttattgtgctgtaacatacagttttaaatttgtatttttatgcccaatggacatggtagctcacacctgtaatttcagcacttttgggaagccgaggtggggggattgctcgagaccaggagttcaagatgagcctgggcaacatagcgagactccgtctctataaaaaaaaatttaaaaattagctgagtggtgatgtgtgtgcgtgtagtcctccttgtgggaggttgaggtgggaggatcgattgaatctaggaattcaggactgcagtgagccatgattacaccactgcactccagcctgggtgacagagcaataccctgtctcgaatgaatgaatgaatgaatgaatgaatgaatgaatgcccaaatccgtaagctatgttctgtatagcagctttttcatcataggcagtttttactcttatcagtggacaacctacaaaattaactaaacacttaaacaattaacagaggaggccttgttcagagtgagaaatcattaagcatttgttgttgaaatttcttactgtactctgttttaattctgtttttttttttttttaatgttacttgttttagtttggattcctagttgaaaagggaatatgattcctttaaaacaaagatactctgctttaaagcaaaggtatatcatcctcttcatggtgattgccatggaaacaagacaatgtaaatttattcaaatagtacacagtttttatagttattgatcatgaggggaagggacagttaatccctactgatcagataaaacctcattgtttcatactaataaatggtttttttatgcttatgaaaggaaaagccagaagtgtaatttttagtgtttagagagctagtgattctagttagggaacttaatacctttgaagttattagtttgcaagcaatagaatctactactaccaaggtgacccctagcagatgtagagtaccattaacaagtgttccagggaaggaaagccaactagataccaagtcatgctttttactcttagattaagaaattcaggttgagttaaaggatcagctgttaactaataaaaagcagattaatattacagagccaggctctgtcctggttatggacttaatcttcacagcatcctcaagagataaaaatgaatatacctgcatattagatgaggaaatagaagataagtaacttgccagagctatgacgtgaactcaggtaatgtagcttaagagcccccacatgtatgtatattgggtgtgtgtgtggagggggtgcgtgtgagtgcttgtgcatgcgtgtggtataataagaaaaaattagcatttatgcctgtaatcccagcactttgggagaccgaggcacgaggatctctcaaccccaggagttcaagaccagtctaggcaacatagcgagaccctacctctacaaaaaaagttttaaaaatattagcgggcatggtggaatacacctgtagtctcagctgcttgggacgctgaggtgggaggatccttgagtccaggagattgaggctacagtgagctatgatgacacctctgcactccagcttgggtgacaaagagagaccctgtctccaaaaaaaaaaattagaactagttatctggaggcctgtgttctagtcctagctttagtacggctacacagtgacacattaggctaccatttaacatctttgaacctctgataatttgttaacaatatgggtaaaaatgactaagataaatcaaagagctccagcattccctccagctctgaaattctatgatgttttatcttattttacttacaaaaataaattatattatgtatatttaaagtatacaatttgatgttatgggttacctatagtaaaatgattactataatgaaactaattaacatatccatcatcttatattgttaaccatttttttgtttttgtggcaaaagcagctgaaatccactcatttagcaggaatcccaaatacagttcagttgtattaattgtaattctcatgttgtacattcgatctctagacttgtttatgctacatatgtttgacttttaaacattctactcaaatcaaccctaagtcagggttagcacagacaggacttgttaacaaggtagaaggtgccacattgtacctgggtgtttatatttctctaaatcttgttctgatcatattttaataaatataatcatcaggacaccaaaattcattccttagctattaaaaaattctattctattttattgttaagatttaggagagcatggtacagattctcttaactatacctatcagaagcctatgttttaagtccaatgtataggcactgctctgtttgtctctggtgggaacttaccctgctttacctaatttcatcctagcttcctttttgtgaaagatcacccttgcttagcctattttttggcaaatctacaccttggaaatagtagtaaatgacataagcatattaatatttatgatgtgatttatttttgttttcaagtcatatactggggaagattctcaaatattaaaacaatgtatctttacatttatgtatgtcgttcttgttctgttttagaaggcttgtatttgcatttttaacattccaaaaggtaaacctgtaatcataatgttttcatcaattcaataaaaccattacgtttgtaatagagagccctatagttgccttagttaagtttgctgcaactcattttatatattcttttaattttgatccctggatttttaattgattattaaaccttcattaggatatatatgaaatgtaaaaatattgagttataatctaccgttttctaaaattttatactgcatttttatatagaaattcaaattgctcataatcattctagtgaatttaagtagaaaggtatttattactaggtattaaatggcttataatattgttgacaaggttccactgcaaaatagttcaccaagggagctgtggcctcttctgtgatcaagaagccatctgtcaacttgggaagcttccactatagcacctaaccccagactacattgagtaggaagctgtaataatcaggaagcttctacctttgcatgctctgcaaaccaacgtgaacctgctgtaatttgtaaccacaaaatggatgcctgttgatacttacgaagctcatcattgtatgctgggttctttgctaatactttcttataaaaattaaatacctccacaatcatgcatgctagcagaaacagcagaggagtagccttagcctcacttcctgcttatacctgtcatgcaaatatacagaacccagaaccctagctgaaagggagtttgagaactagtatttgtattgtcccagattctgcagtggaagaattcatagtggatggaagttagaatgacccttgaattacaatcggccacattcatcacaaatacattaaataagagtaatttgccataaagctctatgtttgtatacttctttgttttttttttttttttttttttttttttttgagacagggtctcactctgttgctcagtctgtagtgcagtggtgtcatcatagctcactgcagtcttgatctcctgagctcaaacgattctcctgcctcagctcctgcttcagcctcctgagtagcggaacaacaggtacacaccaccacactttgctaattttttattttttattttttgtagagatgtgggtctcactgtgttgcccaggatggtctcgaactcctgggcttaagtgatcctcccaaagtgttgggattacaggcatgaaccactgtgcctggcccatatactacatatatttaaaagtagtatttaaatgtgtaggatgaatgaaagaggcagtaagagaacaaagtgaatgaaaaagtatttctatatgaagtgaaagcaggagagtcctctctgttagagaacaacagaattgcatatgacagactagctttcttaatatttctagaacttgatggctgtgaagagcgtcccgtaggaattctcccttcacttaggaaaacatacctcaaaaccatcagctgtttagcatgcacctgcttttcctggtatatctcagtgaagcagctaaattgtaaatgattaagtaaactttgcagtgtatcatgtgcaaaagcacagtaaaaacaaaaatgcattggaagctgtgagttgttgcactgcactcatggatgaatagctgttggttcgcattgcgtttttttgttttgttttgttttgtttttttgagatggagtcttgctctgttgcccaggctggagtgcagtggcgtgatctcggctcactgcaagctctgcctcccagattcacgccatcctcctgcctcagcctcccgagcagctgggaccacaggtgcccgccacaacacctggctaattttttgtatttttagtagagacggggtttcaccatgttagccatgatggtctcaatctcctgacctcgtgatctgcctgccttggcctcccaaagtgctaggattacaggcatgccgcattgcgttttatataattctcatggttctagtctcgagctgtaggattttgatcactgtttcaaacaataatgtgagtttgctaagaggtctaaataacaaaagctaagtgttccaaacacatatccaaacctatacactgggcaatgcatctgaattatatgtgaaatttcctgccattatttaagacacaaaaggaacattattttgataatgtatttatttgtgagtggagtgttcagaatgagcacgatgggtataacatttttgtaggtttttaaagttgaaatttagtgtaaatccaaagaatcaatagacaagtctgtgttttacttaacctatatgtttaaattagcatttttagatactgattttattcctaatttcagaattctcagcgtcttgccgatcaatatcgcaggcacagtttatttggcactggcaaggatcaaacagagagttggtggaaggctttttcccgtcagctgatcactgagggattcttggtagaagtttctcggtataacaaatttatgaagatttgcgcccttacgaaaaaggtaaacggtgtaggagtctgcctgtttgacttaattttgtttcccactccacattaaaagatcctttttgcttttaatagggtagaaattggcttcataaagctaatacagaatctcagagcctcatccttcaagctaatgaagaattgtgtccaaagaagttgcttctgcctagtttcatttttcagtttttttcttgtaacttctgcattttttgttgctatttatgtgattcaaattataccagtttataggcctctcacaagtaaaatgaattacctgtttgtttttgtatgcctattttagtcagtttgggggaagggatctgtgaggaaaggataagtcatagagcacttttcttttttaagagacagagtctctctgtgttgctcaagctggagtgcagtggtgcgatcatagcttactgcagcctcgatctcgtgggcccaagtaatcctcagccacctgagtagatgggactacagacatgcactactatgcccagctaatatattttaattttttgtatagagacagggtcttctagtgcttcctaggctggtcttgaactcctgagctcaagtgatcctcctgcctcagcctcccaaactactgggattacaggcatgatccaccgctcccagccagaacattttcttggttgatgggaagtagctgaccatggtatttagaaaacttctttctcatcgattaaagaagcagtactgaaatcaatgcggaggaatccatatatcatatttacttctggtgtgtagaagtggaaagggaatacatttgttgcttacttttttgtacctttacatgtgattgatcacttgtgagttttttctttcaaacatcttaaagcttccagagctttttctagaaaaaaaaatcagttttaagaatcaccagttctaaaagggtaatatcttattcatctttctgagaatggagtatcatgattcatgaattagatacttgcatcttaacatttgaaataatttaattttattattttttagttcgaaaactgtatcttcgggcaccaaagagcattgttataatcaagtaccagttgaattaagtacagagaagaaggtttgttttaaagaaattgttctgatttatttcattctttattgattcaaattctgtttaaaattttatattttaattcctttccaattaaagagaaaatggcatatataacaaagcataaaattcggccagggaagtgatgtgaacagactaaaatttattgtatataatttctggggctaataaagaattggaggtatttgagaaaggaattaatttgggttcttttaaacctatctgctaactcatttggcttagagtagtcacatgttataatacttatagttgatcaaaaaattgattcctaagtgttcttattaaagacacacacacacacacacacacacacacacattctctctctctctctctcacacacacacacatgcacacacacttatgtactttcttgctttttttgacctaagatcttagataactattacagattaaatactaatccactggcagacttcagctaattagaacactggaataataggcaagcatagtgaattacattttctggtgaactttttctgctttattgaagtatgcagaatgtaaatgaattgtttttataactttggcacttgctgtatcttagaacattcttttgatgatttattttctgtagttttgggagagataagacattggaatgcgtttctaactacctttagaactttagaaactgataatttaggaggttattttcaggtgattaatttgacagcttgattaggcaaagaaaaaattgtgattttgagatttttgtttcttattttcttcacatttaaaagttttttgaaactttttttaatggacctttatatgtttaaatgcagtctaacttggagaagttatattcttataaaccatgtgataagatttcttctgggagtaacatttctaaaaaaaggtacagagttccatatttctatgttctatacttgctttatgagtacttttttttctaaagagaaagaactgtcagatgttgggctatttcattggcaaaaggaagttaaatttaaaacataagcttttcagtattagaatgatcaaagtgagctataaaagaataatgttaatttaatagctaacacttcttggatattactgtttgtcaggcattatgttaaatgctaagaactttatatgtgatatctcatttaattcttacaagagtctaacagctgttactatttatcgccattttatagttgaagataccaagggttaagaagttgacaaacttgttcaagagcatacagctaatggccgagctggctttcaagtctatatttgtctacctctagcatcaagacactatttatttttctttgtatgaaatatatacaggcatactttgttttattgtgcctggctttattgtgacttgcagatattgcatttcttataaattgaaggtttgtggcaaccctgcgtcaaacaggtcatattagccccattttccaatagcatgttctgttgtcatgtctttgtgttatattttggtagttcttgactggccattcaccatttctctccctctcctcgggtctccctgttccctgagatacaacaaaattgaaattaggccaattaataactctataatagtctctaagtgtgtttttttttttttcgagactgagtctcactctgttgttcaggctggagtgcagtagcacaatctcggctcactgcaatcttcgcctcccgggttcaagcgattctcctgtcttagcctcctgagtagctgggactacaggcgccccccgatcatgtctggctaatttttgtatttttagtagagatgggtttttgccgtgttggtcaggtggatcttgaactcctgaactcaggtgatccgcctgccttggcctcccaaagtgctgggattacaggtgtgagccgctgtgcctggcccatctctaagtgtttaagagaaaggaagattcacatgtctctcaatttaaatcaaaagctaaaagtgattaggcttagtgaggaagccatgtcgaaagctgagataggccaaaagctaggccccttgcaccaaacagttagtttgcaaaggcaaaagttcctgaaggaaattaaaaatgctaccccagtgaataaaacaatgataagaaagcaaagcaggctttttgctgatatggagaaagttttagtggtctttataggagattaaaccagccacaacattcccttgagccaaagcctaatccagagcaaagccctaactctcttcaattctctgaaagctgagagaggtgaggaagctgcagaataaaagtttgaggccagcagaggttggttcatgaggtttaaggaaagaagccatctccataacataaaagtgcaaagtgaaacagcaagtgctggtatagaagctgtagcaagttatccagaagatctagctaagatcatcgatgaaggtgcctgcactaacagactttgaatgtagaccaaatgctttctaccagaagaagaagctgtctagtactttcatagctagagagaagtcaatgcctggcttcaaagcttcaaaggacaagctgactctcttgttagaagctgatgcagctggtgactttaagttgaagccagtgctcaattagcattctgaaaatcctagggcccttaagaattatgctatatctactctgcctttgctacatacatgtaacaacaaagtcttgatgatacctgtttacagcatggtttcctgaatactttaagcccattgttgaaacctgcttagacaaaagattcctttcaaaatgttattgctcattgacaacacttagtcaccaagagccgtaatggagacatacaaggagactaacgttgttttcatgcctgctcgcttaacatccattctgtagctcatggatcaagaagtaaattaaccttttaagtattattatttaagaaatacagtttgtaatgctttagcttctgtagatagtgattatcagagatgggtttttaagaggttttccagaaaaccttctggaaaatattcactattctagaagtcatgaagaatatttgtgattcaggagagtaggtcagaatatcaatattaataggaatttggaagaagtcgattcttattaaaatcaagagtttagtgatagacatactgagtttgggatacctgtggagtagtccagaagttaatttaaatatatgggcttagtgtacagaagtgagcagggtgcttatatatgaataaatattattttaagatatatttaaattttccttaaaataatacctatacttgatataaaaagttaattggaaattagtggcttatgacaagcataccagcccacactcttcccaaacccactttgctcttattcatagaagctgtcatcttcaaatcttccagctgatttccctggcgtgtgccttcttatttctgaatgacacgcttagagtactatttttttgacttagcaattttagaaattttctactcatctcctattatggtagatttcccctccttcattcctcctccaatataattatatttcgtcatattaataatttgtttatatatatttttaatataatatgataatattgtatttatattattaaaactacacaaatattatatacacactactaacccaaccgtgttattatggccaccactacctttatttttttccttgtgttagtgattgtctttgttttattttcttggttttgagtattccttttactaattttcttttttcctatttcaatctctcattatttgtttactcatttggagtgttccttgacttttatcccctcttacctagtgacattttaattttagttatcaaatttttaatttctaagaatgcttcttgttctcttcttgtttcttcttccccaccagccaaaaatctatgatgttatagcaaggatcatacattgtttcccagtaggttaagaaaccttggttaaaacctgttgtatcccagtaagttaaaagacgttaacgtgtcatcttcagtatggatgaaagaatattttctttcaaaagcagttggttgaggaagagaatgggacaaatgctctttttaaaacaccaattttgtgatgaactcaaattgcaattttaactttaccattataatgaatgtatttgatccaaaatgtttaaaatctaggctgttgtcatttaaataacaaattaccttactggtatcatgaagaataaatgtttgtactgatttggaaagacattctcatttaggggatgaaatagaaagtcaatgaggagaaagaaaagcttttattatttattttcttttaaatattttagtatcatggtacagtcaccagaaaaagcttacagttcctcacagcctgttatttcggcacaagagcaggagactcaggtaaggcttttgtaaaaaggtaattagtttatgataggatagttatgattctatgtatgcttaaaattctgtattttgccagcattttaaaaattgttcttaagctaagagtctgagtttatatttcagtttatattcattctaaggaaaaatgtggtatctgaagctctaaaaataaaggactagatcttttaagtacactttaaaaagtgttgtttctttgttttttgttcagattgtgttatatggcaaattggtagaagctaggcagaaacatgccaataaaatggatgttcccccagctattctggcaacaaacaagatactggtggatatggccaaaatgaggtaaactatcttttgcatgtgttctatttatttccttctaacaaaatagatttggaaaatatatctaagttgataatatgaccatagcttccactgtcacatctgggaggtgactcagattccccctgctgcgatgcttatctctttgccaagctttagtaccgtgtttctgtatgaataaaaaccagttacgttttcagcaatcatattcaatatttataaaatctaactcattatttacccaccctgcattttatccaaatgccgaaactcctctttttggattctttatttttgattatcttaccatcacatttgtagtcagaggttcctaatgcttaaaacctctgatctgaattttctctcctccaatataaaaccccttcgtcttcctcttcttcttcttcatttttttttttttttttgtctgaagacttgtctcactgtgttgcccaggctggagtgtagtggtgcgatcactgctcactgcagccttgaccccctggactcaagctatcctcgcacctcagcctcccgagtagctgggactacagaacatgccaccatgctcagctaatttttgtattttttgtagagacagggttttgccatattgcctaggctggtcttgaactcctaagctcaagcaatcttcccgcctcagtctccaaagttctggcactacaggtgtgagccactgtgcctggcctctttttctcatttaaatacttttcataccttttgtaaaacgggttccttgttgcctgtctatgccttcctcctccttcttaatgacaccacgttaattctgactgttttcccttggcctgttgcagaagcctcttaactattaacccttcattctctctctctgtttcatctgatatatgagtaccaaactaaatcttcctttatcatatcttacttctgcttaaatgttttttttctagcttagaattcaaggccctctatttatgaacttaaacttacttttccctctaagttacagaatttgaaatggtttatcttacctggattgtttatcacttgttgaagatccattttcaacttccatatatttatttacagtgttgcttctccttgtagtttccttgattcctcaaaactccttttaagaattcttgaagatctcgctttattactatttctcgctttattactgtaaagactatgagaaggtctttcatgatcttatcagcaaagtaattcctctctcttgaattcatagaggactttcagatgaattctaaagatgcttctgtagcacttaccacacaatgctatattttatttttttgtaattagtggtaaacaagtattattatatcttctagattttaaactccaaataaagatactagctccttacctttttgtgtgtctcctgtagcacctagcacaatgcctcataaacaggaggtgatcattaaatatttagaagaaattatttcccaagaatagttgcttggtaattgtatttgtcttttacttccttttaaaaaattgtttctgtcactaaattgcatccaatagatgttacttgagtgcagaattttctaatgacattacacagtgctacatctgacactaattcttttgttaaaaaataaatattctggccgggcgctgtggctcacgcttgtaaatcccaggactttgggaggccgaggcgggcggatcacgaggttaggagatcgaggccatcctggctaacacggtgaaaccccgtttctactaaaaatacaaaaaattagccgggcgtggtggcgggtgcctgtagtcccagttactctggcggctgaggcaggagaatggcgtgaacccgggaggcggagcttgcagtgagcggagatcgcgccactgcactccagcctgggtgacagagcgagactccgtctaaaaaaaaaataaaaaataaaaataaataaatattctaagaccatactttaatagaggtgttttttttttttttttttttttttttttttttttttggtgatagagtctcactctgtcacctaggctagagtgcagtggcgcgatctcggctcactgcaacctccgcctcctgggttcaagcaattctcctgcctcagcctccggaatagctgggactacaggtgcgcgctgccacccccggctaattttttgtattttagtagagatgaggtttcactgtgttgtccaggctggtgttgaactcctgagctcaggcaatccacccgccccggcctcccaaattgttgggattacaggcgtgagccacagtgcctggcccagaggagatatttaatgaaaaataataatcattagataggcagatttttagaaggagggcatcgaatgggttcttggatattggacacaataagaaatattgagctaaaagtctgaaggaattggcagatatactgttacaggtaaacactttgtagaagaaaataatgaatgagactttcttttgagattttcttagcctcttagttgttcccagttaaagcctcatatttttccttttcatgacaataaaaataataataaaatcagtaataaagtgaatatatgagatgttaacctgttcctttatgacaatgtcctgtttaccaattaacagtgtgtttttgtggtgatgggggcaagacaaatctttaaatggtggaaagcaaagaaagaaattataaaacatgattagttgtattatacgttgtttttggttgttggaaaaactatacatttattgagagaatcattaggaagctgaacatcagctatattgctggagtgatactgtttcagtggtttcttgacctttttgttgttgttgttgttgttgttaaacacagaccaactacggttgaaaacgtaaaaaggattgatggtgtttctgaaggcaaagctgccatgttggcccctctgttggaagtcatcaaacatttctgccaaacaaatagtgttcaggtaaaatactgtggtttgcaggagctcttagagaataagcattttttgtaaccatttcaaaagtaccctccagaagcaacatttgctcactttatttgcatttccatactggacacttagaaaatgaattaaaattgtttttacagtcaatctgttgtaaaaacatgtcagttatctacttttaaagatgatactaaaaagtagttgtccaggctgctgatgtctttctatttcattgggaggttttgtttttaaattggaaacattattttaggttgataaattataattttacattcaaatgtggtagttggaatttaaagctggaaagttatccttgctatgagttggtcaggagctcagccactttcttttggtttagcatcttctctaatctccctccccttccagtaatgctgtcttttgatagtaagtggatttcatattattctcttcagttttaatagtgtttccttcatatccttttattattgcttgttctgccctaagtgaccatttccagaaatgtcatttaggattttctctaaactccacgtagcagactctataatgcatactctgcagaaggtgaggcagtgggaggtagaggggagactactagactaggagtcacggaatcaggactttagttcttccttacagttgttcacctggtgaacctgcacatgtcctttaatttccttgggtctccatttcctcagctatacaatggaaatgacacttcctcccccacatccaggaaacaacagatgacattagaaaatagaagacatgggataagtataaaatgttgaaagagttaaacacattcaaggcaatattaagggattattttttacttccaagaagctcctggaagctttgggcaggcacagttggatcctactttagaaaaatctttctctaactataagtagaaaacccttctgctttttgaatgtagcatttccctcttttgatatagagtatctttggcaactttgaattttctttttcatactcttatataagacatcatgtgaaaattcttatttcttactgagtttttggaaatgaaattataatgtcttaatagtttgagaaagaatatcatacctaccagcggtaattgagtaagttccctctctttggacacttgaaagtagtatcttctttcatgaattagtgatattatttaataatgaatgagtgatctctcctaactccccttcagaagaggaaaatgaagtaggggaaaaggtaaattccccaagggataggtatgaaacctttatgaaccttctggatagagaagatgactgctgatttctgtgattagaaattatacttgggttattctgcaaattgaaatgaattatttaaaaaaaaacaactttaatgtttattaagcaagttttgttattcatgagtttcattagccttttattttttttttaaattttgaagtaaaatttcttgctgtcacaatacacattaaaaattacaaatatgacacatattaaacacattaagatggccgaataggaaaaatatgctaaaatatttttatataaatacattttttgagaattttgagaatttctggaacaaagtaatgatataatccataaatgtacaattaaagagtttaaggatatccaaaatacttggcaaagtaatctgaaataatactcttaggaaggtagggcaagaatgtgattctagtaagcaaaaatgtgatcaaatcgtattctagtcccagctactcgggaggctgaggcaggagaatggcgtgaacctgggaggcggagcttggagtaagccgagatcgtgccactgcactccagcctgggcgacagagcgagactccatctcaaaaaaaaaaaaagactatatgaacatgtatggcataaatatgtacaaatattatttattttaaaaaaattcaggggtagggacagggtagttagaaaatatctaaggatgttcatgaaataatactggctatgaatgacagttgatgaaaccgggtggtgcccatcttattccctcgactcgtgtatatgtttgatatatcccacaataaaccttaaaaaaaaaaagatgagtggtcaattataggaagatataaatagaaaaggcaataaggacaaaagttggcaaagcttacctaagcactcttcagataaaaagacatttttgctaactagatttgaatattatagtttaattgtcaaggaaaatgcctcaacttaatctttgttaagagactacttaaggcactatcagaagttccctcatggcaaggtgcaatccctcatgcctgtaatcccagcactttgggaggccaaggcaggcaggttacctgaggccaggagttagaaaacaacctgggaaacatagtgagacccgacctctacaaaaacaatttcttaaaattagccaggcatggtggtgctagcctgtaatcccagctatttaggatgcttaggcaggaggattgcttgagcccggggatttgaggctgcagtgagccatcattgtgccacaatactccagcctgagtgatagaaaaaaaaaaaaaaagtgtctttgttatattccaaacttgttctcaactttcaggtgagctggcttcctgtataactcttgtataggacagaacatactggttggggcaagtgaaactgtctagttgtatgcctcataaattaatgaatttcctttctaatatatacactgatatttatacacacatacacataaaaccaagctcaatagatgggtagtgcagctctattccccaaaacccaactaccctgtaacaagacacattagacttttgagattgcaaggatgaggactgaaatgctggcctagaccatggtgttgccatagtggggtgaccagtctgaatagccaacaatgcttcctcagtaaatacccattttgtcttggtgggatttctataaattgcaaaatgcagctattatgaagctgtaaaagagaaacagaaacatgtaacacctgggactgttttattaggcccaccgtatgctcagaacatgaaatctccactgctagggttatttgattgaaattatcttttgtgttgatgtgagagtttagctctgagattcttccacatgtaaaatgtaatcccccaaagtatttggcaagcacattttattgccttgggtcagataattgaaacattaggcatcatatatatagcatgtaaaaagtaaaacagaaacatttatgtttctcaccaagcagtaaattagtactcaactaataaatttcttaaactccctaataacagaatatggaaacaaaaaataaatctttccaaaagaagagctcatggacacatttcctcatatatgtatacataatatagtagaacacatgataaataacctataaaaatgataccaatatcattcatcaagagacgaggctcttctttaaattattaatttcatctgttacaggttttattatgactgtagtatgctgttttcatctaccttttatgtgtagttaaaaaaatagttttctatctctttacctttatttcagcctttaaaaagattccattattttttcattaatcttgtttttcagtttttcccattttttcttttaaacatttcttaaggaaccatatttaagattttatagaatacttagatttctagttgggatgtatcatttaaaattagatatgtagagagagtgttatgatatatttccttacgatatattagtggttatagtacctaaatttgaatagtgattctgttcattcattcattcattcattcaatattcacttccaggagattggggacttatttaaagacagagtagttcacattatagttcctttttttagtccttcttattcgttaaagaaaagactaggaaatgtttgttattacaaatattttattaaaattttgtgtgctctagcattattttaccttttaaaatcaatatgttaaaaatccaacttctttttgagctccccataaaaagggaattatttgttgcttatgggtttaacttgtgttatttttttcttaatggctaattatcatacatatattctattattgtattgatattactgatcatttgtgctacattaaaaattctgtagacagacctcttttcaagtacaaaacctcaagaagaacagaagacgagtctggtagcaaaaaataaaatatgcacactttcacagtctatggccatcacatactctttattccaagaaaagaagatgcctttggtaagtgtgactttcatgttacagggaatttttttagtttacttaaacttgtgttttatcagctttttagtattaaagttctgacttgggatcaatttcctccaaccctacaataaatctcagtttatctttaattttaaaagagaatgttgttttctttttctgttaagcctccctgttaagtaatagcagcaagtttagtttggccatgaatatcttctagagattgtatcggggtactgataaacacatttgtagctcagggatactgcatcagccatattttaaaatgggactaacagtttaaaaactataaatattcacagtgttaagaaacaatctcaagatgcattaagaaaaaggaaggtgcaaaacagaaaaacaaacgtaaacgtgtgtgcatatgcatgcttatatagtcacatattcttgtatgtgtacaaaaaatacacactggatctctgcaagcatagccaagcaactggaaatatgtttttaaaaacttgcttttcattctatctcttctagtactgttttgatgctctttgaaaacaatctaattgctgtaacaaatgaccatacgtaggccgggtgtggtggctcatgcctgtaatcccagcacttcgggaggctgaggcaggcagatcatttgaggccagggatttgagaccagttggacaacatagggagaccctgtctttactaaaaatacaaaaattagctgggcgtagtgacgcatgcctgtaatcccagatacttgggaggcggagacatgggacttgcatgaacccaggaggcagaggttgcagtgagctgagattgcgacactgcattccaacctgggcgaccgagcaagactcggtctccaaaaaaaaaaaaaaaaaagaccatatgtaatgtttcttcattgttctaagataaatctttaaggctgttgaggttttttgtatacaaaatggagagtaagttttaatgggatgggacaaaatgaggcttacagttgagtttaatttgagttcacatcctgttgacattaagttgatttggaacaagtgatatggtccaatgcctgcttttctattgtctgtggttccatccactagtgcctgtgttacacacctcttgttcaggttttatcatttaaaataaataagaataaacagtccatagcttatcttacttactgaataaatgctctaatttgacagtcatgtttcttaaagttccttacaaaggccattgcccaagaaaccaaataattccattatactatttttgaaatagaacacataataaatgggaattttaagttcagtttcttatgtaaacaataacttctatgtacatgttaaatatgcctgtatatacctaatttgaccatgtatgtatagtagaaatgaaaacagttactaagaaaatttgttattggctccaaattttctgaattaagtgtattctaatgctcagccataatatggggtttcatgtgttagtttatgtattcatggttaaaaatgtgaagactgttatatcttcatttgtgtcttttggtattatttggttgtattttattgtgtgatatggtggtataattatccttacctcccaggagtttgagagggtcttgccagttaaccgcagaattaaacatgcttaggactaattaatcaggagcaatactacaattagttggaggtaatttgaaacctggtttcaaataaccctgatattatgcacacatggtgcacacttttctagtagacatttaatgaaagtaatttaaaacctacctttgaaggatgaaaaacattgccttaaatgctctattctgtgaaagtatcaacatttatgcaaatacagtctaaattcagactttgaaaatgtattgaaagagaggatcatgaaataagttagagctgagtgacaaagctttctgagtgtttaaaagaatgttttacctaataaatatctgaaatgtatttggagccacatttgtttaaagaactgtataaatatgtagcactgttcatgtgaagttcaatagtaggaaaatgctgacagcccttgtggaactgtggttattattattttatgaatagagccaatttcaaacacctattagagtcttctcaggaacattttatagaatgcatctggagccttatgttatctctaagcattttaggatttgtcttcttggaaattcatgtaaccaaaccaccatgtgttatttcaagtgtatatagtattgggttacagtttactatgttttcagaaggttgtgacaactattagacttacagagaatgacttctctgccactaacggctttctaaagtgaatagagaggggcgaggattgaattcttcggtaaagctgggtgattttgttttattcaatacagtataataagtataaaaagtagaacctatagagagctataatgggggtagttttaaagaaattctgaaaatgaaaaacttaagtaaaggtttagttcattgtttatttcacactgagcatttactacctgaatgttttggacattttatttccatgactggagtggacacttttacaactcactgggttctttgctgatctttctctagaagagcatagctgagagcaggattctgcctctcatgacaattggcatgcacttatcccaagcggtgaaagctggctgcccccttgatttggagcgagcaggcctgactccagaggttcagaagattattgctgatgttatccgaaaccctcccgtcaactcaggtgagaggcatggcctagctctgcacccttaatgacttgatgaagtaaacaagcaatccactatatttttcactgttaacagcattaatcctttatgctattatgaaaaccttacttttgtgattctttttcttgttttaggaaaacaatctttcttcccattatcactcagaggaaagtatactgagaaatttttttgttttgttttgttttttgagacagagtcttgctctcttgtctaggctggagtgcagtggcgtgatcttggctcgctgcaacctctatctcccaggttcaagtgattctcttgcctcagcttcctgagtagctgggactacaggcgtgtgccaccatgcccagctattttttgtattttttgatagagacagggttttccatgttggctaggcaggtctcgaactcctgacctctgatgatccgcccacctcagcctcccaaagtgctgcgattacaggtgtgagccatggcacctggccaatacactgagaaatttttattttccttttcagcttaaggttacaacttccccaccatccaaaacgtgcactttcattttttttctaatttctatctcatcacttgcaaaaaccatatttttctccacattcattcccagtagcttcctgactcctagttcttccctaaatccttctgagtccttgtcattggtttcgcttgagtagcctttctaatcaacacagtcattggtatcagttactgtgacatggaagggacagaccaagttctgtgggccgctacgtagaaggatttcctgtcactttgctgcagaacctcagctcgcggagagcaagcccctttgcttgccctgtagaaatattttaaattattatcctttttttttttaacagaagtaaataggagatacgttagaggattttctctcctagatgtgtaaatacaaacttggggtcttataactcaataaatctgataaatttcttttgactgttaggatagagcagtggccataccaatagcctcatctccaaagctgcagtgaagatactttttactaccttaaagtctttcccatttgtgaacaacttgtgaacaattccccccaagaatttggaagatcactctctgaaagcacagtcaatactgtacttaaatggatctgagcaaaaataagtcacttagaagacaggattatttctagacttgagtgtgacttgactgaaggtctaaagaacaaacagctccttcacttccattgatcacggtggaagcacagggaaaggacagacacggaggcaagttggagtagtgctcatctaagttccagggatgcgggggagtggccaggggacttcaggtatagtaaataaataacctatttataagttatgtcaatgtcatgtttgaaatagaaaaccaaatactgcatgttcttacttacaagcaggagctaaagttggtgcatatggatataaaaatgagaacaggccgggcgtggtggcttgtgtctgtaatcccagcactttgggagacctagatggaaggattgcttgagctcaggagttcaagaccagcctgagcaacatagtgtgacccccatctctacaaaaaataagaaaattagccagacgtggtggcatatacctatagtctcagctacttgggagtctgagtcaggaggagtgcttgagctcaggagtttggggttataataagctgtgatcatgccactgtgctccagcctgagtgacacccagagtgagaacctgtctcaaaaggagaaaaaaaaaaaagtaacagtagacgctggggactactgaggggagggaaggaacaatggttgaaaaggtgggaagggacagtggttgaaaaactacgtgttgggtactatgctcactatctgggtgatgggatcaattgtacctcaaacctcagcatcctgcaatatactaatgttacaaacctgcccatgtactacctgaatctaaagtaaaagttataatttaaaaaaattataataaaatcagaaaataaaggtctgagatggaaaattaaaagaccaaagccacccataagcacaataaatccctccccccaaaaaattatatctattaaaaaaaggtgttgcgccaggcactgtggctcatgcctataatcctagcactttgggaggccaagacgggcagatgacttgacttgaggtcaggagttcaagaccagcctggccaacatggtgaaaccctgtctctactgaaaatacaaaaattagccagcagtggtggcatgcgcctgtaatcccagctactcaggagactgaggcaggagaatcgcttgaactggggaggcggaggttgcagtgagccgagatcatgccactgcacttcagcctgggtgacagagtgagactctgtctcaaaaaaaaaaaaaaaaaaagaccttgtaccctgacaagttttagtttgtgcaggaatgctagaatgactcaagattggaaaaatctttaaatgttaattacacaataagggtaaaaggagaaaaattacctaatgtcatctgagcaacaagaagaagaaatgaaaggcattaaaaattgggaaaaatttatatttgacagtatcttaacaacgaattctgcttctatatcacttcctagctttctgatgataacttcccgtgcagatctgtatgtaaggaatggacgtagtagtcatgctaatctgagtatttatctgtgtgatacttacgaattaacgatgtaagttaataagttagcatttcgtgaacctggttaataccatttgctaaggttaaattagccaaatcctgaagtaagctgtaaaacatccaaggtagggtagagaggcatcttatgagaaagctggccaactctcctggtcaccttctaatcttcctaacttcagaaatcaaggcagagagaggaaaatagtaattactttgtaggattagatttatggttgtcgaaacctttgtttctccagtgcagaatgagatagcgttttagggaaagccaaagactcagatgtcttcttcatgctcatcgtgtggaatttttcttcctttagaaatgtattgtctctcagggcttaaagcaatttgcatctttcgatgagacattgagtaataggcaatattctctgaaataatttgtgcaggctgggcacagtggctcacacctgtaatcccagcactttgggaggccgaggcgggcaggtcactgaggtcaggtgttggagacgagcctgaccaacatggtgaaaccccgtctctactaaaaataccaaaattagctgggcttggtggcacacacctgtaatcccagctacttgggaggctgaggcaggagaattgcttgaacccccatgggaggtggaggttgtggtgagccaagattgtgtcattgtactacagtctggacaacagagtgagactctgtctcaaaaaaaaaaaaatagaatttgtgcagttccccccacccccttttttttttctgttggcatttttgctatcatttagctgccttctttatatcctgaaacttacaggtggtgttggtctagtcagtaagagcaaaggctttgggaatagatagatctgtatttagaccttggctctagcatctcattgttatgtgacctccatcaagtgacctaatttccctaatattcaatttcctcatctctaagacagggagttaatattgcctctcttatagaattgtgagaaatatagtcatgtgtcgcttgatgatggggatgaattctgagaaatgtgttgttgggcgatttcattttgtgggaacctcacagggtggacttaaacaaacctagatggtatggcctactacacacctaggctgtacggtatagctcctgtcttcaaacctgtacagcatgtgactttactgaacactgtaggcaattataacacagtggtatttgtatatataaacatagtgaaacatagaaaaggcccagtagaaatacagtgtaaaagattttttaaaaaagctgggcatggtggctcacgcctgtaatcccagcactttgggaggccgaggcaggcagatcacttgaggtcaggagttcaagaccagcctggccaacatgatgaaactccgtttctactaaaagtacaaaaattagctgggcgtggtgttgggtgcctgtaatcccagctactcaggaggctgaggcaggagaattgcttgaacccaggaggtggaggttgcagtgagtcaagattgtgccactgcacttcagcctgggagacagagcgagactctgtctcaaaaaaaaaaaaaaaaaagagataaaaaggtacatctgtacagggcacttaccacgaatggagcttgcaccctgggagttgctctgggtaagtcagtgagtgagcggtgagtgaatgtgaagacctaggactgtgcactgctgtagactttataaaccctgtgcacttaggccacactcacccctgtgatacgagtctacctactgtataacgtacctgcatatgtacccttgaaactaaaacaaaagttaaaaaatttatcttcttttgccaataataaattaaccttagcttactgtaatgattcttctttatgaattaaaatctttttactcttttgtaataacacttggcttaaaacacaaacatattgtacagctatacaaatatattttctttatatccttcttctctaagattttttctgtttttgattttgttaaatttgtttttactttttacattttttttgttaaaaaccaagacaaaaacccacacatcagcctaggcctacatgggctcaggatcatcagtctcactatcttccacctccacatcttgtcccaccaggtcttcaggggcagtcatatgcatggggctgtcatctcctgtgataacaatgccttcttctggacacctccagaagggcctgcgtgttttacagtgaacttctaaaaaataataaaatgtatagtatagcaaacacataaacatagtaacatagtcatttattatcattttcaagtattatatactgtacataattgtacatgctagacttttacacagctggcagcaaggtgagtttgtttacaccattaccaccacaaacacatgggtgatgctttgcattgtgatgttacgatggcatgatgtcactaggtggtaggaacttttcagctccatgataatctaatggatacttgttcctgttggctgcccgtcgttgactgcaacatcattatgtggtgcatgactgtaaattagatactgttcagaaagctttggcacactggtaatagcaaatggtggtggcaaatatgatgatgatgatgatgatgattgaagacatagatggtaaaattttatggtgtcttaaaagtaccctctaaatatgattatttttatagtctgtccttttgaataggcacttaagaatgtatgaacttaataagtatataagaaagaatgttccccaaaatatatcttacagaggcatacaatttaagaattcaaacaggttgtaatggggtgtgtgtgtgtgtgcacacgcgcacgcatgcgtgctcattcacactaaagaattcttgggcatatgttcctgaatgtcctaaatggacattctaacatcacttcattatgggcagagggaaatggtaaagaaaaatttcatattatattattcagccacatattgacagcatctgttttatttgcctatggtaaagaattgaagcactgttaatttgctttttaaatcatgtaggcacaaagttatcgaactttagatttagaaatgaaactggaaatcattacactttccctttcctatccccaccctgttttggagagaaagagtgtgaggcttagagagttataaaactgttttaataccatgtctaagattaataactgaacaagtttctctttttactcgtgttaaagttgtactgccaattaacttaaaagaaagaaatatgcaatttctaatcctgatataggatatgggtatataaactctaacttgatgagtgaaacaaattaacttatttataatcagtttcatatctttatttattgagtgtctttaaataccccttacctttaaagtaagaaatattaaaatcaagcagaatataataatgaaaaattcttaagatatacttactaaaaacttatccttcggttaatacactgtatgtaggttgtacatacaatatgaaaaagtatatttttgtagcctacttttaaatccagaatagaggaggttaagaaggttgtgataaccatgagctcttttttttttttttttgagacaaggtcttactctgtttcccaggctggagtgccgtggcacaatcatagcttactgcagccttgaactcttgggctcaagcaagccttccacttcagccttccaagtagctgggaccacacctggctaatttttaagtatttttgtagagatgagttctcactacattgcccaggctagtcttgaacccctagccttaagcgatcctcccacctcagcctgcctaagtgctgggattacaggtgtgagccactgagcccagccctcttttatttcttttgatagtacactcataatcattaaactatcatttctggatgtgagattgtgcttttggattcttattttttctttataaaatactttttgttctcttactggagaaaacattgttggattataaatgatataacaaggaatgaggatatacatactataataacgattcagatatgttattttcatattttatttaactgtagccatgccacaataatttagagttttaaagaacaagtttgattgaaatctaaactttgtacaatcctgaattgagaagtttcctgtattttattatgacacaatatttacctaaaaatagagtaattatgaattgagaaaacatagctattaatttcatactcttatttgttaagtagattttgtctggaaaactgttcatatttaaaggagctttgtacctttgtattctttttgtttttccttgtttatataattttaaactctgtttatggatttgggattctaactatgctaaataataaattaaggcattgaatgaagtacctagacagtattttgattaattttattcccccattcttaatgtgcatgtaactggaaaattaagagtggcttccaagggatctactacaaaagtaaggttaatatgatctcttttaaaacactgaaggcgtgtagccagtgttgtcattaattctgcagtagatattttcagcacttatttacatgggaagttagagcagagtaagatgcacctgtaaagctaaatgccacttatttgcatatatataaaacgcaggatgaatttaccatagaaatataaagggtacttatagaaatgtattagaaaaatatatgaatttttaacttatatctagaagttaactttatacatttaactttaaatcattaatagtggtttaacaccataagcggatgtttatgcatcatcattttatgaacaaaagacattctaattttagaaataaagtgattcaaaagagaataaaatatcttactttttcttttaaaattaatttgtttagcgcattacatgataatagctcaagcttgtgtgatttttccctaaaaaattggtttataaatattacatttatagtatgaagaaattaatcatacatagtttatttatctaatttctaaatacccatggaagaaaatgaatttaatggaatgtagttgtgtattacttggtttcgagtgtgggaaaatttatatggtctttctaaaacagcactgtcagtagaaatacaatgtgagctacatatgcaattttaaattttctagtagccacattttaaaaagtaaatggatgcaatttattttgataatataatttaattagtctactatatttaaaattttatcatttcaacatgtaatcaatatgaaaattattaatgagatattttacatacttttttctgtaataagcctttgtaatcaggtatgtactttatatatacaacaaatcttctgatgctaaattttaactggaaatacttgatctgtgtttagcttttgtaaaatttactgttgaacaacgtggactaatgtgcctaagtggttccaaacatattttaaaatttgaagacaaataaaagggaactcaaagtaaattgggatacatacatacaacagaatactgagccattaaaaaatgatgaaatagtaaaattgggggaattttgatgatactaggatgatataatgaccaagagacaaatacaattttagtttggttgagagatgtgatcatcacgttgctgattttactatgtatagaggttatcttttcctttctaagattttgaaactttaattagttaacccacttacctagtttctattagctgtgtaactttctcttcctgttttttgttttgttttgttttgttttttgctttttaactgcagtattttgaggagtcttggagtagcaagctaatctttggaagaaaggaaaatataaacctgaaaactaacaatttaaagaacgtcttttcaggttgtcatttgaaaaatacttgatttctgatcactgatttgaattgagtgtcaaatatttgatatgttttgtaaattaggtgaagatgagtgagtaggttctaaactgcttgggtttaccgcactctggagcattgcagaagaatgtgatgttggaaggaagtgctgaaacataattattggcttgcctataggagggtgctacataattttagaaggtgtcaagaaattgacacagtctgaattagttctgttgagttgcaaaaaatgtaaagtttcttgattctgaaaataagaaatatgttcccagaaatctcatctagttaatgtgcttttaaaatcattgatgtctcttgttattacaataatagccattgaaagaatcttttttattagaatgttatttacaggtacgattagcttctatttaaataaattatttttatacttgatcttaggcaaaaggccaacaagtgatcagaataaattattttaagagaaaactaattataattgatatttggaattggaagcacaatttcctttagaacaattccacgaatggttgttttgattctcaaggcagcccacaaaagacagtttgaaacacaatttatgcagtgtcaatagtactgacctgactttggatcttggaggcaggggcttcaggtgatacccgagtggagtttttactccatttccattccgtaaggctataggcatttgaaagaggaaacttttctttggcaaccttccaccttcctttctacagaatatttcagtatttctagctcataggttttctaaaatattctctgtaatttattttgaaatggagtttttttatcgtttacagatatgagtaaaattagcctaatcagaatgttagttcctgaaaacattgacacgtaccttatccacatggcaattgagatccttaaacatggtcctgacagcggacttcaaccttcatgtgatgtcaacaaaaggagatgttttcccggttctgaagagatctgttcaagttctaagagaagcaaggaagaagtaggcatcaatactgaggtattaattatatatagaattttcataaagtgtcagtttgttcaatttgcatatcctagtactagaatgctgtatttttttgaactgttatgaattctgatatgattactttctctatgtgctacatttcctttgcttttcataaatatgatctgagaaaagtgattaaaaaaaagacagtaaaagggaggtttagtccatctgtttagcttattatgtagaatgtcagcttaaattttacctgtacctcatattgaccgtatagcctggaaaatctttcggaggtatagttaatggatttaagcatatggcagtttatgtagttaatgaaagtgaaaacaaattgtattataaatacctcccaaactggtttattatcattctatcattcttcatgctctgttagtatgatattgaatatctgaggtaccaggattattgttgcttgtggctctgagcatttcgtagtgcttttgcatgatgagagaaagattacaaatttagtattatgttagatggtacgttttattaaaatcaaatgcttcaaaaataattgctctgtgtatggcatgagataaatagcaatcagatatattgtttaataatatgactctattaaatgatggcataaatttgaaaatttgaccttcggtatcttccgggtctaaaattatatgactccattataaatattttggaaatgattaactaaaaaattgtttcaattcttagttggtaaattcaatgtggtagtaggtggtggtgattattttgtattagagaattaggaattacacttagttctaaggtaatctttataggatgtccagcaattaaacccctacttttttgaattgcttaaaaataagggaactgatctttttaaattctgtacttgagttacgtctgtatatatagtcatgtcctagataatctaatggaacttaattagttggaaatctttatattgtttataactgaactagctataagaggaacattaaagaaaacatattttgagtggaggtaatgaaatttagcttctaatgctcagccttttatttctgtaatctataccagatacctaagaccctcttattgtttcccagcttcaacctgtcagtatagaaaacggtgtaacttactattttttctcaatattgaagcacatttgtagtgaaatattattttaactatatattgccatttttgctttttccctatttcagtaacatttttcgctatttcagtaacattacatgtcaacaagagaatggtgggtattttggggggggttgggtggggagaaattttactaagcttgctagattctaaaaggtataccttatttggccccttttccccatttaggggaacaagggtgttggggctgggaagtagataagaggtgagtaagtcatccaaagcatatgtcttcattagcctccctgtatgaaaagctgatttctgtagagtgttggaggcctactttcagaatctgtcatatgttaacattcatcttctctactgacctgatttatatcccttagtctatttcattttataattatgacaaaggataaagtcattagaacaaattctttttattagttgacgtattgttgtgtttatatctcttgtgtttgttattaagatggaagctcaatcatgtccttgtttaacagaaaggtgatgtcttggcattgataattctgattcaatatccataggtacatggtggattctttaaatatttagtattcttttatttctggaaagttttcttaaatgatagtttttttaaaatttcatttctataaagttttcttaaatcatactttttagtgttttattccattacttcatatttcttcttcaggaactcctgctatacatgtatgttggatcttcattacccagcttcaatatttttcacttttcatgcattctttttatttcttcatttctctttaaatttttttcttccttttcaccttctatttctcttttaacataattgtatttatttctgtattccacatagcttagtattcacttattttaaaattattttaaaacgttttttagatttaaaaattctttttttatttatatatacatattttatttttaccaaaggagcaacactattaactgaagacttctataatttttttcttttatttctgattctttcttcggttttccccctcagttttgaacttttctaattttgatttgtgatgtccttttgtattttagataattttcctaatgttttccagctcatttggaaaggctacagttttattctgtacctaagcaagtctttctggtgtcaaagatttgaccttgatacttttcttttgctcattttcgtatgagattagttttcctgtactttcaaaagaaggcgtggttcaagatggctttcccaatttcacatctgtctctaatgtttttgtgtaatgtctaaaatatggaaacttggtttatgagatctactctgccatttttatctgggctttctcttccttttgtctctgttgtacctgtcctgcttggttttgatttaaccccagtggtttctcctgaatgtggagccttctcctagaaggcagcctcggctagtcccagggttcagagtagccagctgctctcttcacctaagagaccactgtggattccttgtactcacttgctattggcttggacaaaagccctcccattttcagatgctattatcagattaatctctcattaatctgtctttccagtgtatgcctgtgggctatcttggggttctcttgttatcagacacctccctgctggcctctgctttctcccgtacagatgtcagtactgtgcaggtcttaattgctgttggtggtttgcccctacattcttacagttttagtttcccaaggatacctttaaacttggttttattgtaaatgtcgacaatggattttgggttttactatctagttctgtcttaattctggaattcagaaagattaaaagctctgttgttgcagctgctgccacctcttcccagtaccctctcctcctatgtcatttttttcttcttatttttcttgactgtataagagagaatgtatgacatttcctgcttgaccgctgagtttgattataaattaaaatacacaatattttatacaaattgttttgtagaagatttatttacagatgctcattcacaggtaaaattgacttatgaaaatagttttcatgacaaatgtatcaggctcggtaactaaatatatggattgatcttgtttataaatgaaattaaatgtgaatgtaacttacatatttctgtatttgcttacatccgtatgtacacatataatcagcaaatgagttgatgtttcctattcgtaacttaatggtaatagcttggtaacagagttgggagtattaaaaagatgtaaagagccccttaaaattttgttgctgggaattttagtgttctactgatgaaggaaatagacactggaaggcgttgtttctattaggtaacttagatatcatactgaagacttcaaatacttattgttgacactcaaaagacacacttagtgtaagtaagcatttccccgcttttcccaatgaaataagatcattattataattccattataaatgctgatgatcatatttatagaaatatagaagataagacttgaaatgatattcgctaccaattaatgagtttgaagaagaaatcaggatgtgttttgctattttacatttattcttatttaactccaaagaattcagtgatgttatgtactattatttccatttctctgtgaagacgttgaagcttaagtaacacgcataataaggtcatacatttagcaagtggctcaattaaagttcaaacctggttctgcctggtttcaaagtctgtgctactccatggtattaggctacaacatgacttagggtttcttcctctgctctattgctgttcagatgtactcctcttttggcagagtgggagaaaatttttgcaatctatgcatctgacaaaggcccaatatccagaatctacaaggaacctaaacaaatttacaagaaaaaaaaaaaaacattaaaaagtgggcaaaggacttgatcagacacatctcaaaagaagacatttatgtagccaacaaacatatgaagaaaagctcaacatcactgatcattagaaagatgcaaaatgccttttctgtatgccaccttatatccccagtatttattatttctaagtcatagtatcttacagtgtatataagtctcatccgttcttttgattttctcttccctgcttgcaattgggtacctaggaacaaagttgcaatcttagccagttttttctttagcctttgctgatgtgtgaaaagcccttttttctaccctggatttctgtacttaagctggaacagctaagtttttaccttttttaaatataaagtttcagagtcttctgccaaggatcttttgctgttttcctactgttaaatatttcaaagccttttttaaacatagggaatataatcaaacatagcaagcagctgatgaacaatatctagatagtcttcattattgaaatggaataaatggtatttttgtattttaggctaacagacaccttgtaccttagataaggccaaccttctcataaaatccctcagttacttttattaataataaccaaattaactctggattccagggtgtactcatgatggaatgatttctctgtcatgttatcctgaggatctagtactctgagataacataagtgtatgacactttaggcttatgaaacacttagctacttaaattatttaattttttttcatgtgcagatggtattgtacccaaacactacctttgtgtgtgtgtgtgtgtgtgcctgtgtgtgtgtttttgagacagggtcttactctgctcaggctggagtgcagtggcgtgattatagctcactacagccttgacctcctgggctccagtgatcctgccaaagtgttgggattgcaggcgtgagccacctcacccagccttaaattatttttttttcaaggatgtttaacctgagggttagaggctctttggcacgtgagctgctgaaatgtgtgtgaaagtgttgtgcacgtgtatgtttctctttttttctgggaagtggatctgtagtgattcttagatgagtctatgagacaagaaacttttatttttttcatttatttagcgaatgtttgttaagcgtactatgccttggccactctacagggtgctgattggaccagtctgtctacctaccgttgtagatgttagaagctatattcttttcacatgcctaatataactctttgtgtatgtatacatgcccaggcatgttccttcctcagaacattaaattcaccattttggtcaactcaaagcaagtacaccatgggacacagatctgaaataatgtccagatttttacttactgaatgaggtgtgttgagtgtataagactacatgatgagatggcaagtaattgcctgaagaaatgatgtagtgattttgtgtgtcttatatttatttactttttgatccagaaataaattatatagataccactattttgtttggatgggggagaaaggatgggtgtgtattcaggaacttatgttacttttttgcaactaataccccttctcagtagtacaaagatttgatttctttttctttctatttcctacagacttcatctgcagagagaaagagacgattacctgtgtggtttgccaaaggaagtgataccagcaagaaattaatggacaaaacgaaaaggggaggtctttttagttaagctggcaattaccagaacaattatgtttcttgctgtattataagaggatagctatattttatttctgaagagtaaggagtagtattttggcttaaaaatcattctaattacaaagttcactgtttattgaagaactggcatcttaaatcagccttccgcaattcatgtagtttctgggtcttctgggagcctacgtgagtacatcacctaacagaatattaaattagacttcctgtaagattgctttaagaaactgttactgtcctgttttctaatctctttattaaaacagtgtatttggaaaatgttatgtgctctgatttgatatagataacagattagtagttacatggtaattatgtgatataaaatattcatatattatcaaaattctgttttgtaaatgtaagaaagcatagttattttacaaattgtttttactgtcttttgaagaagttcttaaatacgttgttaaatggtattagttgaccagggcagtgaaaatgaaaccgcattttgggtgccattaaatagggaaaaaacatgtaaaaaatgtaaaatggagaccaattgcactaggcaagtgtatattttgtattttatatacaatttctattatttttcaagtaataaaacaatgtttttcatactgaatattatatatatattttttagctttcatttacttaattattttaagtacctttatttttccaggatgtcagaatttgattctaatctctcttatgtagcacatgtgacttaatttaaaacctatactgtgacacagagttgggtaaacgatgattatttaactttaagcagttcaccatccatttcaaagcctttgattggcttttttgtaaataaaaataacttgttaagaaacaaatatatctgtcatagaagaactagaaaatccagggaagtgagaaaaatgaaaataaaaatcattcatagttttactagtagctaatcacagtcaacctcttttgtgtatcccaccagacttttttatattcatttgtttttagttaaaatataaaagtctcgtatattcccatttttctgcattgcattaccagaaggtagtggcgcctattaaatatgtgatatgttgttgtccagccatggcttctgcatttgcatgcttttgtgtgtgcatctgcaataccctgtgaatatcctgtgtgatggagtggcaagtacgcacagacacgtctgctgcatgcctaggtacgaggctgtctccaggagaagcacttgtttgattatttgagttgccaattgaatttgctgctttttttcatggcttgccattttcactgaaaagaatgactaatgaaaaacgatgattggttattagatttggatgtttggcagacattttctcaaaattgaactaagttggcctcttcacggaaaacaactggtatttgttgtgccaatgataaaattggagatttctagcaaaatgtataattttggaaaagttgtgttcctccactggaagcttgacagctttccttaacataaagacttctctttctcttcgctttcactactactactactaattcttcttctgattcttcttcttctccttcttccttcttccttccttcctcctcctcctccttcttcttcctcttcctcttcttctttctctctttccttccttcccttcccttccccttccttccttccttccttccttcctccctccctccctccctccctccctccctcctttctttttctttctctttctttctttctttctctctctctctctctttctttctttttctttctctttttctttctttcaagcagtcctcccgcctcagtcccccaaaatagtgggattacaggtgtgagccaccatgcacagccttacataaagccttttctaatgagatggatagtaattaacaaatgtgagtttttgatattatataaagattttttctgtgtttcgaagatccgtataactcagtgaatcagtatgttctggatgactaatatgtgatgttaagaaatcatgactgaggccgggcgcggtggctcacgcctgtaatcccagcactttgggaggccgaggcgggcggatcacgagatcaggagatcgagaccaccctggccaacatggtgaaaccccgtctctactaaaaatacaaaaattagctgggtgtgttggtgcgtgcctataatcccagctactcgggaggctgaggcaggagaatcgcttgaactcaggaggcggagattgcagtgagctgagactgcgccactgcaccccagcctggcgacagagcaagactccgtctcaaaaataaaaaaagaaatcatgactgggtaaaagatctgttcagagtacaagatggaccaatggatttgatatatttgaatataacagagtatgaaaaagtttattgatatagtttcagattacacactgcaactaatctttaagaaactattacttgtccactttttggtaaaatttcagagaacaatgtccaccattatctgaacaggctattaaaatactcttctcttttccaactacgtgcctgtgcaaagtcagatttttttcatatacttcagccaaaacagcatatcaaaatggattgaatgcagaagtagatctgagaatacagccacttttgttaagccagacaatgagatttgcaaaatgtaaacaatgctgctgttctcagtttttaaaaatatgttttttaaaagtatttatgttaatgtgtacttggtttactactgctatttttaaataaaacaagaaacatttttaaatgtctgttttaatttctaaagtggtagtgatagatataacccatattaataaaagctctttggggtcctcagtgatttttttttaagagtatggaagggttctcagacctaagagattgagaaatgctgatgtaatgttttattataaaggtgtaccatgaattatgtaccttacttcatattgttggacattaaagttgctttcagtttttttgttttaaa

SEQ ID NO: 5 - DNA, 142390 bp, Homo sapiens
  gene (1)..(142390): c.3233+1G>CiExon26 skipping mutationj
gcaggaacgggggcggggacggcgctggaggggcgggtcgggtaggtctcccggagctgatgtgtactgtgtgcgccggggaggcgccggcttgtactcggcagcgcgggaataaagtttgctgatttggtgtctagcctggatgcctgggttgcaggccctgcttgtggtggcgctccacagtcatccggctgaagaagacctgttggactggatcttctcggggtaaagtgtcttcctattcccgttttcccagctccgtgccccggggtatctatagtgctaggcttctgagacacgtggaggcgcttaggcccgcggagcaggcccctgggctgtgtttgggagattctggaaaaacagactttctcccttttcctttcccctctggagcagctgggaaaggcgtctctcggagcttccgccattcagaaagtgtttccccgcccctgacggccccagcttgatgtttaccttgcgcgcttagttaggattgctctttctagtacggcctttattatggcagaaattgagccactacaggtctgcacagcaaagtcgagggaaataacctgctgtctatgatttagcaagtgatgatggatatttttgagttcaaatcactcagtctttaatggattttcttttctttttttcctagttgaatctcagttgttctcaggctaggtttgatatgaaaaatactactccctattgaagagggtaatataattcttaggatgctaatacaggagtctgtaagtcggagtacttcaggctttttatggttcggtacatttctttttaggggtgggatattgggataagtaggacagttcagatcttgatgtcattgaatagtggtgtctacctaaaaggaagaggctggggcacaaaattataatttaaagtgtttacttcagccaaaatgaggacagctgcccaggactcatttcccagttgccttggggagtgctccttcagccttggttacaagcaggtttttaaaggcgaaggggaagagtgggctgagacaaagttggtcaggaattgttattggtttacagagataccattgcttagtgattggctgtacactgtaactcatagggtatgagttatcgtgtccagcatatggcattttatggcttcttggttccagtctagagcccatatagcaggtgggctttaagagataattatccagctcagaccgggagtgagacgggactgttttttcattctaatgcctctctgggcctgataatttaaaggggcttgcattcttcagctaaaattttattttcttttattttttttcccccacagtggtctccctttattaatccaacaaatgtttattaaggactgctctaggcactagagataccaacaatgaacaaaacagacaaacatctctctccttttggagcttacattttagtggaaagagacaggcaaaaagtaaaattataggatgacagaaggtgaaaatagagattaaaaaggaaagggggatgaagagtgtgtgtgtgtgttgtgggtggggggctgtagggagctgcagttttacaataagtggtcagggacgtcctcgctgagaagggaatttttgagtccagagctcaaggaagtgagagaacttaccttgacgttctctggaggagaagaaagtacaaaggccctgggggaacctgcctctttatgttcagagagcaacttaagaggcctagtgagctggagcagagcggagaggaggtcagaggtcaggccagaaagggaaaggggccagaatgtgtaggactttatgggctatattgaaaattggggctttcattctgagggagatgggaagctgttggagagttgttagggaaacgtgatctgaattatgtttctaaaaaattggagtaagatatcataaaatttgccatcttagtcttttttgtatctggccaattccactcagaattcttttttaaacagctttattgagatataattaatatatcatatgattcactcatttaaagtgtgcaatacaatggtttttagtttgtcttcagagttgtacaacctttatcacaattacctttaggactttttcattacccaaaagagaatctccataaccattagtactcaatcccacccgctttcctagcaatcacttacctatttttttgtctctatatagctctcaaaccctatgatattccttctatctaactgtatttttgtactcattaacagcctctcttcattcccaccacccatccatcccagcctctggtaatcaccattctacttactacctcaatgacatcaaattttttagctcccacatataagtgagaacatgcgatatttgtctttccctgcctggtttatttcacttaacagaatgtcttccagttccattcatgttgctgcaaatgacaggatttcattctttattatggcttaatactattccattgtatatgtatatcacattttctttatccactcatctgttgatggacagttagcttgattccatattctggctattgttgaatagtgctgcaggaaacatggaagtgcagatagctctttgacatactgatttcatttcccttgaatatataccctgtagtggatttgctggacccgcttgtagttctacatttaatattttgagttatttccataatgttagtaataatttacattcccaccaacagcgaggaaggagttcccttttctccacatcctcgccaacacttatcttttgtctttttggtaatagccattctaacaggtgtgaggtgatatctcattgtgattttgatttacatttccctgatggttattgatgagcaatgtttcatatacttgttggttatttgtatatctccttttgagaaatgtctattcaggtcttttgctcattttttaaatatggttttttaatttttttatttttttgctattgagttgtttgacatccttaaacattttggaaattaacctcttattagatgtatagtttgcaaatattttatccgattctgtagattctgtcttcagtctgttgaatttgctgtgcagagaagcattttattttgatgtaatccctttgtctatttttgcttttgttacctttgcttttgaagtcatatccaaaaaatcattgcccagatcagcagtccccaacctttttggtaccaaggactggtttcatcgaagacaatttttccatccacaggagggaggggatggtttcaggatatttcaagcgcattacatttattgtgcactttgtttctattattattacattgtaatatatagtgaaataattatacaattcaccataatgtagaatcactgggagccctgagcttgttttcctgaaacttgagggtcctatctgggagtgatgggagacagtgacagttcataaggcattaggttcttctaaggagcatacaacctagatcccttgcatgcgcaattcacagtaggttttgcgctgctatgagaatctaatgccaccgttgatgtgtcaggaggtggagctcaggtggtaacgtgaggaatggggagcagctgtaaagaaaaatgaagcttcgcttgcttgcctgctgctcacctactgctttgtggcctggttcctaacaggccatggactggtactaatctgtggccctggggttgggaacctctagccctgaccaatgttagggagcttttttcctgtgttttcttcaagtggtttcatggtttggggtcttacatttaagtctttagtccattttgagttgatgctgtatgtggtgagagataattgactactttcattcttttgcatatggttatcagttttcccaacaccgtttattgaagagcctgacctttccccattgtgggttcttggctcttttgtcaaaaatcagttggctataaatatgtggttttatttcttgggtctctgttctgttctattatctgtgtgtctctttatgccagtaccgtgctgttttaattactagagtttagtatattttgaagtcaggtagtgtgatgcccctagctttgttcttttagctcaacattgctttggctattcagagtcttttgtgaggataatgttttcaaggttcacccatgttgtggcatgtatcagaactcgatttctttttatggctgaataatattccatttgtttatattatatatatgccatatttatttattcatatgttgatggacacttaggttgtttccaccttttggctattgtgaataatgctgttattaacattggtgtacaagaatctgtttgagttcctattttcaattcttttgggaatatacctacgtgtggacttactagatcacatggtaagcttttagtttagctttttaaggaactgctaaaactgtttttccatgggagcagtgtacaagtgttccagttctccatatgctcaccaaaacttaatttccttttttaaaaattatagctatcctagtaggtggtgggaagtggtatcttactgtggttttattttgtatttctttaatgactaatgatgttgagcatcttttaatgtgcttattggccattatatgtcttctttgggaactgtctattaagtcctttgcccattttttaattgagtttttttttctgttgaattgtgggagatctttatatattctgaatattaaacccttattgggtgtatgatttgcaaataatttctcccattttgtgggttttcttcactttttgatattgttctttgattcacttttaaatttttatagagtccagtttatctgttttttcttttattacctatgcttttggcatcatacctaattcccaaatccaatgccatgaagattttctgttatgttttcttttaatagttttatagttttactttttctattggagttttaagtaaattcttgtatattagtgtgatacattttaagttatttttgtatatggtgtgaggtaggggtccaacttcactcttttccatatggagatccagttgtcccagcaccacatgtttaagagtctattctttccccactgaatggacttggcacccttgtcaaaaatcaattggtggtaaatgtatggatttactcctggaatctcaattctattctattgtatttatatttctgtccttatgcctgtaccacactgttttgattacagtagctttgtagtaagtttagaaattgggaaacatgagtcctccaactttgttcttcttttcaagattattttggctatttggggtcccttgcaattctgatgagtttgaggatcaccttttccatttctgcagaaaagccttttgatagggattgcattgaatctgtagataactttgggtagtattgacatcttaacaatattaagtctttctatgcataaacatgggatatctttccatttatttgtgttttctttaatttctttcagcagcattctgtagttttcagagtacacgtttttcacctccttggttaaatttattccttggtattttattcttttagctgctattgtaaatgcagttactttcttagtttcctttcagattgttcatttctggtgtataacaacagctgatatttcaacgttgatgttgtactctgaaactttgttgaatttacttattagatctagtagctttctttgagatttttatatgggattatgtcatctgtatatagagatagttttacttcttcctttccattatggatgccttttatttcttttccatgtctaatttctctggctagaactttcaatatgatgttgaaaagcagtggtgaaagtgggtatctttgtcttgcttcctatcttaggtggaaagctttcagtctttcaccattaagtatggtgttagctgtgggttttcataaatgccctttatcatgttgaggaaatacccttttattcctagttttctgagtttttatcatgaaagggtgttggattttgtcaaatgccttttctgtgtcaattgaaatgatcatgtatttttcctcccttatcttaatgtaatgtgttatattgattaattttcttatgttgaaccacccttgcctttctggggtaaatttcagtcacttatgttatatagtcctttaaattgtgttatcttataacagaatcactctgctactgttttgagcataggccatagggaaaagcaggtaaaaggtaatatggcttgaaccaacattgtagcagcggaagtggtgagaggaggtcgaattttggctttgttttgaagatagaaccaacagtatttgctgacagattagatgcagaatgtgaaaggaggagatgagtcaggatgaatccaaggcttttggcatgagcaaccagaaagatgaaggtgacttactaagatgggaaatatacaaaaggagcagtttggggaaactttatatctattgagtggaatatgccaattagagattcaaatatccagtaaataattggctatcaaagtttgaagttaagaggaatggtctaggctgtttatataactttggaagtcattagtgtataacagctaatttaaaagccagcagactctaagggagtgagtgtagagggagaagagtagaggtctgtgacttgaatcctggaatgctgtgatgtttagagattggggaggtaagaaggagcagcagagtatactgaaaagggattgttatactgaaaagggattgatatagatggagactcaagaattatcacagaaacctgataaaatgtttcaagaagatgggtgtgattaattgtgtcacttactgccggtacattgactcagatgagcgttgagaattggctataggatttgacaacataaaagtcattggaaaccttgacatgagcccttttcgtggagtggagtggttacagtgggtttaagagaggattaaaggagtggaaacagagatgctattatagatgactcgtttgagtagttttcctacaaaggggagaataataatggagcagttagccaaaagttgagtttttttttcttcttcttttttttagttggaaaaaattgcgtatatgttgatgggtcttttctggcagaccagtagagaggaaaaagttgatgatgtaggagatgggaaaatgtctttgagtagatgtcttcgagaaaatgtctttgagtagatgagaggtttgcacacatggagaggttggatgtaggagtactgatagttcatccatagttacataagaaaaggtagatgtattagagttctcctgagaaacagaaccaatgggagatctttatatctctgtgtccatctctatctgtatttctgtctctgtatctatgaagagattataaaagttttaagatctgccaggagacatacccacgggagctaatggtatagttccaggccagttgtgaaggcctgagaaccaggagagcctatggtgtaagttccagtctgagtccaagtctgaaggcaggagaagaccaatgtcccagctcaaagacaggcagagggagcagatcttcccttacttagcctttttatttattcaggccttcaacaaattgaaggcccacccacattagggagggcaatctgctttactcagtctactgaatcaaatgttagtctcacccagaaacatcctcacagacacacccagaataatggttagccaaatatctgggcaccccatggcccactcaaattgacacataaaattaaccaccacagtagagtatatgggtacaaatataattatgtgatatagatttcagggtaagagcctgtggaaattcatttttgattgcttctagtgaaatcggaagcaagatcatcagctaagagtgacgatcggtggaggagatatgaagtttaagtggagaggagaaggtataaaatagtcttaggaggggaggatagtaaatagattagggaaaagttgtaggattgccaggaagtagtaagggcccacttgaggctggtggtcacaaatttaaggtgagaccagtcaaaatggttgtgcttttcacctgctgcattcattcagctgcataggtacaggcacagagtaggtcaagagttcttttttattcggggttagagttttgccaggagatagtaataaagccagaagggcaatgaatttgagggagtatgcaaggaagtggctgttaacttggagtttaaactagtcaagaagagaattaaggactgcccaaggggtgaggacaatgatatggtagcagggcccttaaaagccccagttagatgaaaagattgttggaattgagtttctagagggaatgaacttgaaaaacaggaggtgttggttggagagtgggatatatggaattgagattatggaaggattcagtcgttggtaataacatagtatctttgtaggaataaataggtggagcaggatgcagacaagatcactggaggagggctggtcagaagactgggaggcactatctcccttggatattatacatcaaagcttgtgatctactagacaagtagtggggaaagggtaggatatagatattaatggctatagttttgatggtgatggtcatggtgatgatgatggtccattaacactcaactcaaataccatcaatttgatttatatctaacaccacaaagttaggtgttgagttacatgtggttatattgtaactaatagtcagcccttcatggacttctattctttgatgagactcttcttgtaggagtagtaggtgccttaaagcaccttttcatagttgtcagattgaaatccttcaccagtgttttaggttaaccctgttactgtggaagtttctcttggctttctgtgtgggctgcttctttgtctagttttaccttttggggttagcatactattgtgaataatttattggtgagaaggtaagcagagaagtagagtactctatgacctagtaatttcatatctaggaatctatcctatagaaatgataggaatgccttacaatacccacatatccacaagggtattcattgaacgttatttttggtgaaattcgcaagcaacctaattatcatcaatagggaattgttaaattatgatagataaaatggaattctattcagtcttcaaaaagtcagatcaagaagtggtcttacattttaattatcccatcctgtcaacaagagtgtcttcagttgcaagtaatggaaaaaccattcaaactgacttcagcaataaaaggttatttattggtctgtttcatggagacatctgaggtagagtggccttcaggcaagttcactcagggatccgactatttttctggccttattcttggccctcttctatgaaaacaccttcagggtggtttcttgtatgcttgtaagatggctacttgcatcaaccatgaccacatctagcaggagcaaaagcatcctttcccgtaccagaggagagtcccgaaatttgttgcaattggactgccttggaagcaataattatggccaggagatggaggctagagaactgagacctgatcatagctcctatccttgaatcagttgtatagcaaggggaattggattttccttaagacagttggatttcacctgtagtcttggtgatgaggtcagttccatccataaaactttgctgttacacattttgggatggggtgaggagggctgaatggagattaggatgctattgaaatttgctgtacacaatggatcattatcgtcttctttcttagtgttaaggtaatcagcctctttttcctcctcctatgcttgactttactaaaaccatgagacatgtttaacctcaggactccaatttgaaaaaatatagactgttatttactttattacttacagaagcccttcatactactctcagcaagaaagaggtaggcagggagtgagggaggggggatcatgcttactgagaaacaaactatcgagtattgaaactcccccttcatatgcctgacctcagtcccattcagttaccagtaggggcccctattaattggtacctcaccagcttttgctgttcgttcataaaactgagtcattgaagtacagtagaaaaataattggactacaagataacttatttccttccataattgcaaaatatctgatttttcttcttgtttgtattatgtaaacttaccctgtctgagggtcctcctggattgttctttgcatttatatatacatagaatttcattttcttttttcttgttttttttttagacggagtctcactctgtcgcccaggctggagtgcagtggcacaatctcggctcactgcaagctccgcctcccaggttcacgccattctcctgcctcagcctccccagcagctgggactacaggtgcacgccgccacacccggctaattttttgtgtttttagtagagacggggtttcaccatgatagccaggatggtctcaatctcctgaccttgttatctgcccgccttggcttcccaaagtgctaggattacaggcgtgagccgcttgcccgaccttcttttttttttttttttttttttttgagacgttgagatagagtctcactctgttgcccaggctggagtgcaatggcacgttttcagctcactgcaacctccacctcccaggttcaagcgattctcctgcctcagcctcctgagtagctgggattacaggcgcccgccaccatgctctgctaatttttgtatttttattagagatggggttttaccatggtggtcaggctggtctcgaactcttgactacgtgatccgcctgcctcggcctcccaaagttctgggattataggcgtgagccactgtgcccggccaatttcattttctattttgaaatttaaactaccactgacacttcgttttccctctgttttacttagcatttatcttagagaataatcttaatatgtatagttctattttattcttttactggcagcttagtatgccatattttggatgtgtcattgtttatttacctattaatttaccctataactgcttcccatatttttgcttttacaaagggatgtaatgaacatcctttacatacgtctttgtgcatatgtgcaaatatttccataggatagatgtaattactgacttgaaggttatgcagatttaaaattttgatgccttctatgaaacatctttcaaaatggtgatgccagtttcttctctcgtaattactgcatatggtcaatcttttaaatttttgctggtaatgatatttcaaaattataaccagttttttggcctcatttcttgaataacttgttttttctcaaagataagaaatgtctccttcatcgtatgtcaaatttccatatttacatggatctatttctggacatggcaagttttatttatttattgtatgtatttacggtgtacaacatgatgttttgatacacatatacgtagtgaaatgattcctacagtcaaacaaattaacatgttcaccaccttccatagtctctgcagtcttcaaggttttctctatatgggattagacatgctatgtctgatctgtttttgtatttttacaccaattccacactaattttttttttttttttgactgggagtctcgttcttattgcccaggctggagtgcaatggcatgatctctgctcactgcaacctccgcctcccaggttcaagcaattctcctgcctcagcctccctagtagatgggattacagcactcgctgccacacctggctaatttttgtatttttagtagagatggggtttcaccatgttggccaggctggtctcgaactcctgacctcaggtgatctgcccgcctcggcctccgaaagtgctgggattacaggtgtgagccacctcacctggcacacactattttaattactgtagttttaaaagtttcatatttagtagggtgagtttttccttgttggtcttgtttttcaaaaaaaatttgctgctcttgagtattttctcttcccagtgaactttaatgtaaactcacgtggttcaatgaaaaattctgatgactttttttcttggtattgcttcttgagtgtattgatttaattaatatatttacagttttgggtctggctgtgccgaaacgcagtgtgtcttatccagtccttttttaactgtcttaataaaatttgctggttatctttaaaatggatcttgtatattttatgttaggtttattcccaggcaggttgtcatttttgctgttactgattttggatataaattttggatataattgtataatttggacttggatataattgtatttgattctgtcttatatataaaaatgagataggataataatttatcctaggataaaaataatttgagtatccttattttgcatctggtaccttacttgctcctgttaaacaaatagataaaattacttgtcttcaaagagatcctgtggaaaaattatttattttaggagactttggagctttgataaaaattaggcttatcttttgtaaaagctggttagtgatagcaatcagactcttttaaaggtgatttttttttctttcctttgataaaatgcttaatatgagggaggattaagaaagaggatggcttttgaacagtttcttcatggggaaataagaaattagaataatttcatgttctccaaaaaaaggagaaaaatgaccttccctcctgagcctacttcaagcctctgtttctttctgactctattgttctcatctctgcatttttccaatctcttctactgttagtgttttaggctagctcctcagtggagggcagaaattcaccttctctttagctgtctttgaaaccaagaagatagaggtatgagatcttcgtagtctgtagtaagaataatagaagccatcagaaaaaaatatcaaagctttgtagctgctcctggaagttttgatgtgaagcaggagacatcacctattggtacctgacttgcttttgctgttcattcataaaacagagtctctgaaatacagtagaaaaataattagactggaggataacttttttccttccaggaattacacaatcacaaaattgctgatttttcttcttattcatgttacataaacttatcctgtccgaaaagactgtatttgaacttactatgtaagatttgctttaggtaaatttatggctgcttccagaattgtgtattaattttccagtttcttttttaccagtctccacttttacctttccctcttccccctatacttaaattggtcttactgtaaaatttatgcgtttctctttctacctggcaatgctgattttttttttttttttttttttgaggcaaggtctcactctttcacccaggctatagtgcagtggcaagatcgtggctcactgcaacctcgaatccctgggctcaagcgatcctcccacctcagtctcccaagtagctgggactacagatgtgtgccatcgcacctggctcatttttgtattttttgtagagatagtattcgccatgttgcctaggctggactcaagccagcctcctgccttagcctcccaaagtgctgggattgctggcacgtaccactacatccagccagggctgagtttctgaatcatcattgcagcaagagaaattggattacctttagaccactggctctactgtgggctgggagtgggacaccttccttaaagcgcattggacattggctttgtgggtaactgatctttacctgaatgaaatttatcagtactgtattaagggtctagggtggaacggatgctagcaaggcaaccgttaacatccacttactgatgaatcctataaaattttatttcaggccatacgaagtaacagtaataaatataaaaggaaaaatagacaacctaagcaactttttaaattgacttacttgaaaactttccctgcaatttcccggtttataatggttgatttcagctgactggctatagctacttagagaacagaggaaattcattaaaaataatgaattattcagttgggtagtgaaatccagttataaagcacttcgctgtgccatggattcagttcaggtcaagtgatgttcctggtttatgggcagtgtggcttctcactatgacacagcaaagaacgtagcttttatcctttacccttgttactaactaaaattaatggcattttattgtgtttatttgtttgattccatttacagtttatttcacttggttttattagtacaaaattgtgctttatataatatttgacagttaggaaaaattgttagatacctataaagaaacaagtctctcaaaaatcatcctactacttttaaaaattacatcgtcttactacagttaacctagatgtgaatgggtagttttatttagcttttctggtttgtttgcttggtctgtttggagggaagttaagattagcagaaatgtagtaatagattcatgaaagtcttgaaagcttctttaattagagaatttaatgagggctttggcatgcattctttggtttttctctgttttcctctaccccttcttattctttttggttcattgaaaagtagaaagaaattctcaaaaaccgtacaggagaataccttataaatgatatcttctgcaataaactatagattgtatatatgtatatgtatctagatacacaatctgtgtgtgtgtatatatatgcttgtgtgtgtataaatgtataaattagttactagtatatacgtaagtataaaacctcaatgtgcaaggttacattttcagaaaatatgtaatataataaaagaaatcaagcccagaatttttaaaaagtttattgcgctttctgttaaaaatgaaaggctttttgactggaagctgcttctcagtaaaaataacataattgtgttggtgaagcccaaagattctaatgaaaattagggtattgacaaccaaacggaattgctggagtacttaagctgctttggttttgtaatctttctgtgtcagaatatttgaaaaacacttattaatccagtcttgtaacttatccttgaaatctcttttttaatattcttttccacacacatgaaaagttagatgagtgtatgaatttctgttgtcagactagttgtaaacctcctaaatatagtttctgcagtatagttaaagagaaagaacatcctggctaacacggtgaaaccctgtctctactaaaaaaaaaatacagaaaatgagccgggcatggtggtgggtgcctgtagtcccagctactccggaggctgaggcaggagaatggcgtgaactcaggaggcagagcttgcagtgagccgagatcacgccattgcactccagcctgggcgacagtgcgagactctgtctcaaaaaaaaaaaaaaaaaaaaaaaaaaagaaagaaaataggcccagcaaggtagctcacgcctgtaatctcagcacattgggaggctgaggtagggaggattgcttgaggccaggagttcaagaccagcctgggcaacatggtgaaactccatttctacaaaaaatacaaaaattagctgggcatggtggcatgtgcctgtagtcccagctacttgggaggctgagtgggaggattgcttaagcctggggaggttgaggctgcagtgagctgtgactgagcaacagagctagactctgtctcaaaaaaaaaaaaaaaagagatgggttttgaaattcagtactttttttgagtgaggtccaatgggtcagaaagaagcattggataaatgaatccattttctcttctctgtttgaatttgtaatttgaaagaatattctacctataaagtacttcagtgcttaattagctgtcagtgaatttatatatcttatctaattcatatggatttgctatttttatctgtacctacagattcctgacctctctaaggggatcccagtatactatagggaatgaggtataatagaagtaaaagacctatcactagtcctgtcatcattccaactcatgtgtaattatagtttaaaagaagtgacatcatgtgtattgctgtttatctttacattaatcttgtggtcaagaaagcaaatactataatatataataattatataatatcataagacaagtaatataataatgggaatataatcccattttacaaatgaggaaatgaaaatttagagaaataaagtgacttgtccagggtcacatggatactaagtgaccaagtgtcaaagcagaattttccaaataacttaaagataattcttgtacaaatatagaacgaacacatgtcatatgtgttgtgttaatgagggaaccagaaggatgacaacattggttcagagagatgcaaagataaatatagacattggaggaaaaagttggaaataagattgttaggttagatacaaagctgtgttataggccaataaaaaccatagactttgaggttatcttttttactggacaggattcagttacacctttatgagaccaaaatttattatttaacatgtggatattagagtctgagttttaaaattattagtaaatgaccgtcaaataaagatatgtcccctaatgaaatactgataatcgctgggtgagcttgtgctcctatatgacattgaaatgacatactgccctctctttgtcttctaagttttggatacttttttttttttttttttgacacaaagctgcattagaacctaggtttcttgattttcagtccagatttctttccactctacttcctgcttcttcatagtataattttcaacactagagcagtctgcataacttttgcaaaatcagctagtctttcttattagttttcctttgtgcaaagtgatgtagatacagctttcttcttcagagaaacattgtgaaattcaatgaatatttgtaaaatttgcatacgtgcccaatgtgagaaattgaaattattacttaagtattgcaactgttcttttaggatattttgtttgcaaatttcagagtaattataaatattcttgcatttttattgtaatcagtatttataaaacagtgtatttcatcacattaacctttacatattttgaataaaatagtattgaaccattttaaatagtaagtggaaatttttccacattaaacagtataacgggctaacagagttaagcattgcattatttaactaataattttttcctgaacttcagattattatctgtatgtgtcatataacttgacaattttttttttttagtgctttttaaaaagagtgggatactttattcagtttagccctcaagcaattaggcaagtcagttaccatggtaacagtaggtattaatttccttacctagttagaggttttatgaacaaagaaatctctgagttcatccaccaaaacccaactttctcttgagactggcctcttgagactggtgttaaatttgtctattttctagaagatgacactattctaagtggaaaatacggttctcttgaggtgaatttctactctatcaagagtgaagtagagtatggcttaaaagttaagtgattaaaaagctaccctttcttagctaatttggaatgtaattggtcttaatttttctaaattcgttctaaccaaaatcttattggcgtgatttctattgacatgaactagaagtgacttcagcagacaacttgtcccaatatctaaatgctgtcaaatagaatcacttaagatgaatttcttccaaaacagagttcacaattttgacagataatctcttagcatttaattgactagtattaccaaccttatggaataggtccactcgtttagctatcatgaggaccattttgcaactaacttatcaaaaagccttcaccaagaagttgcatatcttattgatattttagaatgcgattatggagattaaaaatcaccacaatgggttgttaataacgccagccttgaactttcagttttagagcattttatctgtgttctgtagtcaaagttggtaaggtgtccagtgggtcatgtttgacttgctgcttgtttttgtactgtgtgctaaatggtttctacatttttcagtggttgaaaagtcaaaagaagaataatattttatgaaatttaaataaatccaggtttcagtgtctataggtaaaatttcattgtaacgttgttatgcttaagtattgtttatgacttctttgctatagtgacaaacttgagtagttttgacaaagatcatctggcctgtaaggcctagaatagttactgtctaaccctttagagaaaaaaattgctggcccttgttctatagtatgaaaaaatatagccttgattattcattaaaaaattattttcccattttattgacatacttttgtcccctgattgttaaaaggaatgcatgttcttatagaaaagttggaatatatagaaaagtataaagaacaatatgaaaaaccatttgcaattgtgagataaccactaatgttttggtatacattgctccagacttacacacaaacacacacgcgtatttattttatacaattagagtctaattttttttttgagacagtcttgctctgttgcccagggtggagtgcagtggcaagatttcagctcactgcaacctctgcctcctgggctcaagtgattcttgtgcctcagcctcttgagtaactgggattacaggcgtgcaccaccatgtccagctaatttttgtatttttagtagagacggggtttcgccatatgcccaggctggtctcgaacccctggcctcaaatcatcggcctgccttggcctcccaaagtactgggattacacacgtgagccactgcgccttaattttttaatttgcttttttcacttgaataattataagaacattatttttaatgactgtgtagtgttctgttttatggatgtaccatacttaattatttagtcataatttattattatgaggttgataaacatgataatcagattgagctcaagaagctagttatagggttgcacaattaatgaatcccaggtacctcgctgggttgctgaggctgctatttttttcctgcctgtttggaacactgtgtttgggaccaatgaggcaaaagaaattgaagagctgccattttcaattattctattagaagatacattgaagatttgtcaaatgacatagacacaacactaatccagaagattatttaatcaaaaaggcattcatttcagatatgaattcataaacatttgtaacgatcctcagtttgaagaccatatagaatccctgaagaactggaagacactatttgcttggcaaagagaagtccccagaccaactggggatgaaatattcaaagagataaatgaatactttgaaacatacaaggtactatggaaaaagagtggaagtttgggacaggtaatgacaggaagatataaaagctttacattaagttcaatctaaaactttattccaagtaacaggttgtcttattcatggagaagcagttgtaaattaaaacttgcctgtggtttggaatttcacattaaatgattacattaaaaattcaaatggtgaacctaactaaatccaagctcctacagtaccttcttttcacctttaggtgaagaaatgcggtgagctattttattactgattatgtggacagtccaaaggaaggttcataagcgaaaaggaaaaatttaaattattccatgtgagcgattcttactttgcagatttgttgaagtgtagttactggcttcaaaaagtggtatccttaactgacattttgaacacttgaattcactcaataaaaaaatgcagtgatcatgtggaaaatacattaaggtatatgacagagtttatggattcagagcaaaaattcagctttggaaaagtgaagttaaaatggttttttaagtgatgtttaattggtgttatttgaatcctaaagaagaattaatagtactagtagaggaaagtcagtgtgtctgtgacaaagctttagtattattttgaaatacttgatataaaaaagttcacgtttactcaaagcttacttaaatcatcagaataaattaacatgtttcttaattaaagaaaaggagaagctattagacttaaaaaatttttgcacccttgaaatacatacaatttgaagagattaagttgttggaatactggttaatggtgaaaaaggagttttcagtctatgaaagcaaagccttctcctttgccatttgcttttttgtagtggttgctatgtagaattcgaagaaaatattgttaaaaagtcttggtcaggagtagagtgtagcatgaacccaatgcattttaacgttaataatgaggaaaaagggaatgcatgataatttcatcaagtcagaaaaaaatggaaaaagaaaaagaggaaactgaagaaagtaactgatgaaagtaaggtgaaagggaaaacaactttttataccacctgtgaatgagattaattttcgtttccatactgaaagacaaatatattccaattaagccattcaaaataaaaaacaatttttttttggtaagagatgggatctcactatgttgaccaagttagtcttgaactcctgccctcaatcagtcctcctgcttcagcctcccaaagtgctaggatttcaggcatgagccactgtgcctggccaaaaccaaaattaagcaacaaaacaacaacaacaaaaattccagacagcctttaaaataatgataaaggttgaaaaattgtagatagtggtaggtagataagatttcaggaaaagtccaaagcaaatcataatacgttattttaaaggggggtttaaaatcctttaaaggtacaatgtgaagcattatgaaatgataaaatacatgttttttaaaaacattaattttattttaagttccaggatacatgtgcaggacgtgcaggtttgctacataggtaaatgtgtgccatggtggtttgctgcacctatcaatctgtcacctacatattaagccccgcatacattagctgtttttcctgatgctgtccctcctccaggacccagtgtgtgttgttccccatgtattctcatcgttcggctcccacttataagtgagaacatgtggtatttggttttctgttcctttgttagtttgctgaggataatggattccagttccatccatgtccctgcaaagtacatgatcgtgttcctttttatggctgcatagtattccattttatatgtaccacattttctttatctagtctatcattgatgggcatttggtttttttccatgtctttgctattgtgaatagtgctgcagtgaacatgaacatgtgtgtgcttgtatctttataataaaatgatttatattcctttgggtatatacccagtaatataattgtataacccagtaataggattgcagtgtcaaatggtatttctggttctaggtctttgaggaatcgccacactgtcttccacaatggttgaactagtttacattcccaccaacagtgtaaaagcattcctatttctccatagccttgccagcacctgttgtttcttgattttttaataaacgccattctgactggcatgagagggtatatcattgtggttttgatttgtatacaaaaaagatttgtatttctctactgatcagtgatgttgagctttttttcatgtttgatggttgcataaatgtctttttttgagaagtgtctgttcatgtcctctgcctactttttaatgggattgtttgttttttttttcttgtaaatttgtttgagttccttgtagattctggatatagacctttgtcagctggatagattgcaaaaattttctcccattctgtaggttgtctgttcactctgatttgctgtgcagaagctaaaagacatgattttagaaaaagacatgtcaaagtcatacatgctcaacgacatagcgagtacatatgtaaataaaaaattattttatgctgtgaatttgaccgaaaataacctttacctcgtcaggaattacaatcctcacgtatggtaaaggatttccctattgcaaattattccacaacattaatgttctgtgtgctttttatctatcccaagatacaagtaaatttgacaaagatattaggtttgtaaacaaatttacgttcaaatctttgcctggaagtatctagatagaattttgcatgcaaaagagtatttacatctaaaaaattacatatttcaaattaaaatgattttagtgttatagatagaaggaaagagttattgaagtttatttctgttttggcagtgtaaatgaattacttacaaaattttagaagtctacaggtgtttttataaagtttgtgttatttgtggaaacctcagttttctggcattttgccaatgaggtctactctaagtatagcagaaatttgttttccagctttataaatatatattttaagattaagaactgattttacttatataatctgggatcaacttttggcttctcctgtcaaggattttgaatttgtgacaaaatatacacttattgataaccagtgacatatataaaatgctttacaattaataaagcatatgtattttacatattttttcactacatatgacgcatgtggcaaccccaagagttgagttgtacccatcggcaaactttgatcatgattctgtgaatataggcaagcaccaattgcaggtagaacattctttttttgagtcccaaaccgtgagaaacaaattacagaaatgtacctttcttttgcattaggacacgttgtagttttgtatgaacactctagttttaagcagtatgtgcaaaaacattgcacaaaggatttgtgtgttgattttgggactcctgtattattaattatgtggtttatttgactaccccacattttcaagcataaattaataaatccataattccaggcttattaacaataaacaatctagatagttgaactctttcttgctaacattttctagatatggactgtttggtatttttctactaataaagacccttagtaagctgccttctggtttgatgtcattgggatgtttactgggaactttggtggagatcttgcagtctctctcccccagtggtgaaagaatgagttacaaaccagctttccttcccagtgtacaatagcgatggagtttgttctatatggaaaatttgtttgataaaagtattctttaaaattttttgttccataaattatcagtattttcagtttctgattcatgcttgggatagttgctgcatattgtttaattttgtcagaatttatattgttaaatatcaaatacgacagactaccctcaaatcataagtagttaatgtaattaacatcctgtttcatcatgagactcttcagtgttacattaaaaactgctacctcctgggccgggcgtggtggctcatgcctgtaatcccagcactttgggaggctgaggtgggcgatcggatcacgaggtcaggagattgagaccatcctggctaacatggtgaaaccccgtcgctactaaaacatgcaaaaaattagccgggcttggtggcgggcgcctgtagtcccagctactcaggaggctgaggcaggagaatggcatgaacccaggaggcagatcttgcagagagctgagatcgtgccactgcactccagcctgggcgacacagcaagactccgtctcaaaacaaaaaacaaaaaacaaaaaaactgctacctccttattacaaataggaactaaagttgaagtttgaggaatttgctaagaactaagccttgaactaaggctattttatttgagtatgagtcatatcagggtacggatccattttactattaacaaaacaaatatgttctgttttttttttttaaatgcacacaccacgtttgagagattcttattcactgtattttctttaattatacttgaattttggtttacattgaggagtgccctcaaagatattaacagatttttaaaaaatcctctaaaaaactcattcttagggaaatttgttcacttactaggtgaggagcaaaataaaaatccttaatatagaagagctattatctgtcttcaaaattaagtctttgagtagatttgtgaataaatctaatagttttgctgaatttacttagatcttaagacagaataatcatgtagaaaatttaaaatgtcaggaattcataatgattcatatacccaaggattttcattgatagtgaggtaaggttattcttgagaaagactcaaagtcataaaataatagaatttcgaaactaccagaattatacaagtcaattaaaatgactgatttgttttaagaggaagaaatactaaatgtataattattagatgcagcatattgtatctgttttgttttgtgattctagctcttataacctatgcttggacctaggtgtcataacttactttaaatatgtatgtttggttttcattcatattgacagtactacctctcagttttctttcagatattgttttgtatttacccatgaagacattgttttttggactctgcaaataggacatttcaaagatgagtgaaaaaaaattggaaacaactgcacagcagcggaaatgtcctgaatggatgaatgtgcagaataaaagatgtgctgtagaagaaagaaaggtatgttgttcattgactattcttttgggtgagaaatttaatttatatttgactgtgcaaagagtcagttgttacttgtaaacttcaagtcattgtttaggtcagagttgctgttgtctaaatgcaccaggacctagttgttgaaagggtaaactggaataaactttaattgggtttacaaaatgagaattcttactgtatattttctctttttcgggttgactttaccagtttgttctagttcagataatttagacaacattaactttgttgaattttttgtttgccagccggtcttcagcattttaaggcaacattattattacagttgtaatacgaatataattaccagagaaaaaactcaggaaaataaatgcttttatgaaaatgggattagaggtttgaaaataaacttgttaggagaaataatttcacaatgggatggttttttctttgttaagttttctttatgacttcattagtttataaaacattaattgataaaacttagaactataaattgaatgcttcagtgaactttattatttcagtgaacatttgttatttgatgtgaactttgtgcctgttttgaaatttactaaactcaaggcatgtgttcggaagagtgtttttgaagatgacctccccttcttagaattcactggatccattgtgtatagttacgatgctagtgattgctctttcctgtcagaagatattaggtaagtgatttgaatttcctgattttatttgaatttggacccttagaaggtactattatggtaatgtttgtgaatatactgagttttacaggtgaggtgtgttcaatagataattatttctatgtatacactatcaccaagttttacatttcaaataaaagtcactgaattaatttgtaatctgtcagtttgttcattcataagcttttctattacttcagacagtttttttttaacttttttaatatatgtgctgctgaagcgagcacgacagttttttaactttcagtacttaagatgttatatatagagctactgaacatactgtgtttattttaccaatttagggaaaaagtgcaaaaattatttaacctttaaatgcacctttatatttcattaaaaatatcaacatagtaatattgaataatggctatgatcggctctgttgtgtgtaattagtaacagttgtagcaaatgatccttaaaaaatgttctaactaaacattagaggccaggcgcggtggctcaggcctgtaatcccagcactttgtgaggccgaggcaggtggatcacaaggtcaggagattgagaccatcccggctaacatggtgaaacaccgtctctactaaaaatacaaaaaattagccaggtgtggtggcgtgcgcctgtagtctcagctactcaggaggctgaagcaggagaatcgcttgaacctgggaggcagaggttgcggtgagccaagattgcatcactgcactccagcctgggcgacagagtgaggctccgtctcaaaaaaaaaaaatccaaaaaaacaaccccacaaacaaacaaaaaacattagaaatgtctgttagtacttttaaaggttgccttgtaaaattaggactgcaatagtgcaatctaaggctctcaaagcataaaacaagtaataaggaattcattcagatattttccgaggtggttatacctgtcttttaaaaaaaaaattttgttatatattgggttaaaaaaagcagaggtgctgggcacagtggctcatgcctataacccctacactttgggaggccaaggcaggaggattgcttgagcccaggagtttgagaccagccatagtaagacccccatctctacaaaaaaatttaaaaattagccaggtgtctgtggtcccagctactcaggaggcctaggttttgggcccgagaggttgaggctgcagtgagccttgatcacaccattgcactccagcctgggcaacagggcaaaaccctgtctcaaacagacaaacaaacaaacaaaaggcagaggtaggttaagctatttattaatggtcttctactggtatagatataagctagaaataacattcaagtgtttttacttttactacagttatctggccactttgggactcattatactgaattagtttcacagaggaggtaaaatctgttgtttatgattacatattaactctaccattttaccttcagcattgctgtagtatgtcatatctgaaggcaattagcacaagtgacttgaagaattgtagttttgatgacttatatgtattttataaaaggcaggcagagtttttgtgtttgctttcccctcctctggacactttaaatttttgctaccacaggtttccaacaatttgattatgatgtgcccttgtgtaatgtggttggtgtttatttggcttggagttcgttgaatttttttgatctgtgtgggcttatacctttaatcaaatttgaaaaatgtcttcagatcctttttcctcccatcctgttattcttttctctttctgggactcttagtacacacaagtttgattgcttgatactgtgtcacaggccactgaggctctttcctttcagtcttttcttctttcttcctttttttctttctgtgcttcattttgaatagcttgaatagttttgtttcctgtcttcaagttcacttatatttttttcttctgtagtgtctggtctgtttataccatcctgtgaatttcttttttagatactacatattttgtttatctctagaagtcccatttggttcttaatttttttttccattttggctctcattattcatgtttctttcaaaattcttgaacatatttagcatatttttaatagctgttttaatgtacttgtctgttaattccattattctagggtttttttctttctattggatgatttttctcctgattatgggttatattttcctgtttattcctacagctgttaatttttttttttttaattaggcattgtgatcttactttgtggaatgttagattttattgttttcctttaaagaaaggaactttgtcagacatctaagttacctgaagatcaactttatgttttgaagcttgttttcaagcttgatcagggaaagtctacgtttgcctttagtctaaaggtaatttagccctataataagatgtgacccttctggagtctttgtagactgcctctggtgatcaacgatctcttctctgacttttcagaacgttaatgcctcttacctttgtgtaagtccgtcctaagaatcattcagcttatggttgtttgcccagccccatagagttttagtctatgcatgcttgtcttcgtattctgcaaagaccaaaggagtcccttagggagatttctggagctcttttcctgcctagcttcctcctctccagaactctgccccgtgagttccaggtccttcagcttccagggctctgaactctgtctccccaactcagtgctctccttgggattcttctccctgttctgttgtctgcaatgggtcccaggaagaatgtggggcaactgtaaggttcacccttcatttcccttcccttagagatcatagtcctgtactgcctgttgtctagtatctgaaacagttgttttatatgttttgtccaagtttagatttgtttgtggtgggagggtgagtctggcctcccttgttatatcatgttggcctgaagcagaagctgagtttcttttattttttaaatatagtttcaatttttaacaactattaaataggcaagtatcaacaacaatagataacaatataatagatatgcatattcctcccactttatcaaatcttaattttcttcaatttttttttttttttttaatagggtctcactctgttgctcgtgctggagtgacagtggtgtgatcttggttcgctgcaacctccgcctcttgggctcaagtgatcctcctgcctcagcctcctgagtagctgggactacaggcatgcaccatcatgcccagataatttatatatatatttttttatagagatggggtttttgccatgttgcccaggcggtctcaaattcctggactcaagcaatctgcctgccttggccccccaaagtgctgggattacaggcgtgaaccactgcgcctggcctgttttcttcagttctttattaagaaatgaaacagtaaaatacagctgaagccccgtgtttgttctttctgattctccctctgtgcccctctgagataacttctatgagttttgtgcatttttttttctttttaataaaaacagggtcttgctctgttatccaggctggagtgcggtggcgagatcatactcaatgcagcctcaaccttatgggctcgagtgatcctttcgcctcagcctctcaagtagctacaactactggtgtgtgctgccatgcctggctaattttttatttatagtttttaaagacagggtctcactatgttgcccaggctagttttgaactcctggcttctagtgatcctcctgccttggtctcttacttaaagcactgggattacaggtgtgagccactggctgctcacatgttttttataatagtacttaataattttatgtctgaaaatattatataatgttattttgcccatttaaaaactttaaaaaatgctaacaaactgtgtactctgtaacttgtcttttttactcaacactacgtttttgagaatttttcttgttgatctgtgtagttccattttaactgttatatcttactatgtttcattatgcaacagttggttcaatccattctcttgttaatggaaatttagtttgtttctaatttttgccagtaggaacagtgttgcaatgcatattcttaaacatgtctgtacacatctgagggtttcatttatttgtgacaaaacttgccaggtcatagtgtttatgcaccttcaactagatattgtcgttgtcaaagtttttttccaaaaggattttaccaatttatacatgaaccaccgatagatatcctcttaacacgtggtattctgaaacttaatttttaccaatcagatagatgtgaaatcacgtagacttagtttgcatttctttgacttctagtgagaagtagtgtcttcacatattttttggatttttaaaatttattttttatttttgtttttcttagagacagggtcttgaacttttacccaggctgaagtgcagtgatgcgatcatagctcacgctaacctcgaactcctggactcaagtgatcctcctgcctcagcttcctgagtagctgggactacaggtgtgtgccaccaagcccagctaatttttaatttttttttttgtagagacatgctgtgttgcacaggttggtcttaaactcctagtctcaagcagtcctcctgccttgactttccaaagtgctgggattacaggggtaaaccaccatacctggccatatcttttggatttattggtcatttggattttcttttgggaattacctgttcatatttttctccatttttctgctgaataatttgtcttttcttacttatttttcaagaaattttacatattttctggctgttcattgtcagttgtatgtgctccagataacttgaacagtctgtggttgccttttaatttttgaattatgtctttagttatgcagaagtttaaaattttaacataaattaatttacactatttttctcactttagcatgagtctatcagatggggatgtggtgggatttgacatggagtggccaccattatacaatagagggaaacttggcaaagttgcactaattcagttgtgtgtttctgagagcaaatgttacttgttccacgtttcttccatgtcaggttggtatctctacatttcatttttatatggctgataattgtaatatgtcaactttatccctataaaattaagttcttttattagctggccgttctctcattatctcaaatttatttaagtatttatgttctacctgattcactcacattccttgttttatttaattttcacaacatacctgtgaggcattgacattttttctgttttagagaagagaaaactgaaattttaagaggctaaatgaccaggatatgtactgctattgctagcaggagtggcattcaaactgattattttttcttgtcatttatcaatcaggactgtttgctttagttaagaaatactcaaggtcaatgtgtttctgaatttaaaattactgttaaatacaaatttacacataaacatggtatgtataagaagtaggacataaatccatcatacttgacagaacttatggaaataacaagaaaatgttacagtttttccccagggattaaaaatgttgcttgaaaataaagcagttaaaaaggcaggtgtaggaattgaaggagatcagtggaaacttctacgtgactttgatatcaaattgaagaattttgtggagttgacagatgttgccaataaaaaggtaaaagcaatatatatataattttcatgatgaagattattttgtgttacacagaatgtactttctatctgaatgttagatttttttttgaaaaagcttgttatataatgtttttgtagcaataaaaaagttccaagtgaatgttctttaatgaaaacctttatttatttatttatttttaacttttgtttcaagatcggggtacatgtgcatgtttgttacacaggtaaacttgtgtcatgggggtttatcatacagattattttatcacccgggtattaagcctggtacccattagttatttttcctgattttcttcctccctcctcccaccctccacctcccacagtgtgtgttgttcccctctgtgtgtccatgttttcttatcatttagctcccacttataagtgagaacatatggtatttggttttctgttcctgcgttagtttgctaaggataatggcctccagtgccatccatgtccctgcaaaggacatgatcttatttattttttttatggctgcatagtattccatggtgtatatgtaccacattttttttaatgcagtctatcattgatgggcatttaggctgattccatgtctttgctattgttaaatagtgctgcagtgaacatatgcgtgcatgtgtctttgtaacagaatgatttatattccttttggtatatacccagtaatgggattgctggggcaaatggtatttctttctttaggtctttgaggaattgctacacagttttccacaatggaaagcctttagttctaatccatgtcttggcatagagtttcttttctttttttttttttttttgaggtggagtttcgctcttgttgcccaggctggagtggaatggtgtgatctcagctcactgcaacctccacctcctgggtttaagtggttctcctgcctcaggctcctgagtagctggggttacaggcatgcaccaccatgcctagctaattttgtatttttagtagagacggggtttctccatcttggtcaggctgatctcgaactcctgacctcagataatctgcctgcctcggcctcccaaagtgctgagattgcaggcgtgagccaccgcacctggccggcagacagtttctttttttctttttgagacagagtcttgctctgtcgcccaggctggagtgcagtggtgcaatcttggctcactgaaacctctgcctcctgggttcaagcgattctcctgcctcagcctcccgagtagctggcactacaggcgtgccaccacacccagctaattttttgtattttttttagtagagacgaggtttcaccgtgttagccaggatggtcttgatctcctgacctcatgatccacctgcctcggtctcccaaagtgctgggattacatacagtttctttaagcaagccttctcttttccttcctcccagttcttggtactctttcactttcatatatttgcaaatgtaaaattgtgttttaggtgtatatttttaatccatgtataccagtaacttaaaaaaaaatttttttttttttaagggagagcataatggagctcttgtgatacggtgctcttagtggaagtttggctatcaattccatcacctgtatttcacatattttattaatgaagttcttaaattaaattctcatatttagccaagtattcatttggctgggaggtagaaagcctactaaccaactttttttcatgaacaatatttttaaagtccaagatttttaatacctacattagggaaattctagaattaaattcttacaatgtggactgcatatgaggcttttagtgacagggaatttgttgaaggctatctgtgggttgtattttggtataacatttcctaattttatttgtggtatgttcatttgatatcatttggtaatacctgaaaacaggaactgattttactgtgttgctttttcatcatttctagctgaaatgcacagagacctggagccttaacagtctggttaaacacctcttaggtaaacagctcctgaaagacaagtctatccgctgtagcaattggagtaaatttcctctcactgaggaccagaaactgtatgcagccactgatgcttatgtacgtgcttaaagatctttagaaattgtgatgtgttttaaaaacattattataaatgactttagaaaaattttattatagtagtggcagaaactctaccaaaatattttatatcaatttggcattgaaaaatgcttaggaagacatttagtgaaactattcattttcgatattaattagcaagtaccaatcaacagattgttcaatgctagtttattttcattgtcatgaagccaaattaatgtctaatttgtatgttaaaaaatgtgaacttgctgaaaacatgaaaggctaataaatccaggctgagcaagcataaatagtactgatgatggatttgatatataaacaattcagaatgaaaataattatagtacagtttctattttaaaactggccttatttcttatatataaaatgtggtgaaattttagaaaaattgcctccaaatttagcttgttgctgccattagatatatttttatatttacatgtttgtatgtagtgaaatctgggcttatctttatatatagcactattgtgtgttttttaagaaatgtattttattccacagtgaatttgttttctcctaactcatgctttcatttgtagatgaatattttattgtttctcctttgcatctatcaaaggaatggaaactcctttgaattgtaaccagcaaacaattcacttttgttagggaaattggatgataattttcctttaaaagataccgccaaacttgagactaacattctcagctgatttaagtaggatttctcttactagattgcattttgttagattccattttaagttattttatttggatattgtgtgtaatattgagtgtgaaaaagtgaaaacaaacttttaaggctcaggcacctttctcaattttcacaattggtatgattattaaatgaggacatattgatatttgtgtcacataataggttgaattccatgtttgggtgctttgtgaatcattctcttcgatttttctgaagatgggacttactgttttatttcggtgatctttagcatactttttaaatttttctgtttttttataggctggttttattatttaccgaaatttagagattttggatgatactgtgcaaaggtttgctataaataaaggtatgttaagatccataaataaaatgtgaattcactcttttgtgaggtttatctccaaaaaaggcaatattcacatatttgcaaagcatttagtactataacttcttgaatgtctgagcagtcctgacattagggtgggatccatcagggcccaagatgagtgtttcatctttgttacttgtggcaaagcagcccttacttcttttactttgtagcattgctatgtatttggcttctagagttggggctttgtggctttcttattgcagtgacacaaccagctttctcctagtctggagattatacatccttgctataagtatttaaaatgctttctatataatgctttaaaacatgtaagatggcttatccccaagatggtagctaataaacactaagtgataaagtaggtaaagatctatttattcatttattaaatattgttggtcattttacagtgctttctaacatactgatttacatttctaattttcttctgtcatttttctccaaaaataatggtcatgtcatccaacctcagtgctgtttttagaggtcttgataagccagtgagagcagaaggagccacgtagtagagtgggtgagcccaggctttttgttgcacagaccaatgtgaatcccagccatgtgacctgggatgtacctgtttctccaaacatggaatgtagatactagcataatgtccgttttaccgttttatagaataattgtgaagacttaaagggacaaactattcgaagcatctgtattgatataaagttatcactattctcgtagcttccttttggagattttaaatgattgtgtttgttaagatgttaattaaattaggccattttgctaaatgctcttaaaaatatggcatgactgcctcatataaaatgatatgatattctttataattgtcgttgagcctctgtgggtggcaggccctcctttatatgttaaggtagaagagtctttattcttacttctcctccctggagagccacttcctatgaatgcctgctggttctctgtagtcagaggtcttgtggctgtaacttagagtcagtctccatatccctgggttctgcatctgtggattcaaccaaccacagattgagaacattcaagccaaaaaaaaaaattcacagttttaaaaaaggaaaagttgaatttcttgcatggagtaccacattgaatctatatgaatgaagtgatgcgtaggcattttataaggtattataagaaatccggagatgatttaaagtatacaggacaatgtgtatagattatatgcaaatattgcagcattttatataagagacttgatcatctatggatttgatatcagtgggagggaggttcctggaaccaatccctcaaggatacagaggaatgactgtatgttaattaactgaggcaggtgatcggttttttaagctgattagggaaacagtatataagaacttacttaactcataataaaactaaaattcaacaggggagagttatgattttttggctttatggttgtggaattgcatgtaggttacatgtacaattttgttacatgtgcaattttgatgaaaatgcttccaaggaatgtttatgatatttttcactaaagtaacatatattaataacacagtactggaagtcctggtatctgtgtacttgtcattgtaatgctacattatttgaccttcactttttttcccctttattacattatatgtgtgagtatattgtgacatcttgactcagattccagtgaattgtattaggttggtgcaaaaataattgtggttttggtaatttttaatggcaaaaaccacaattacttttgcaccaacctaataactaagattaccatctttttttccttccttcctcccttccttcctttctgttattcagccagaagtatcagcatcactgttctcttattttcttcatgtacatatggatgatattttcgaatgaccacttttctcttttgctttttattattagactgtttttttcttcttgttaaaggataaaaagattagaacataaaaggatatttacacattgtttccccattgacttattcccaagatggtagctaaaaacaccaaatgatatagtagttaaagatacattgactcatttattaaatattgttgagcattttacgatatgggaataccgtagtgaacaagccaggcatactctgtttcctgaggggcctacagttttattggggatatagatgagtgaagaaagcaattgcagtgtagggagatgagtcttatgtcatgggaaaacaaggtgctgtagttgacacaccgagaggcatctgacacattgggggaaatattctagaatatttcctggagaaagtgcaggtaaaagccagacctgaaacctgagcaagagttagctaaggccaggtgcagtggctcacgcctgtaatcctagcactttgggaggccgaggtgggtggatcacctgaggtcaggagtttgagaccagcctggccaaaatggtgaaacaccatctctactaaaaatacaaaaaattagctgagtgtggtgacgggcacctgtaatcccagcttcttgggaggctgaggcaggagaatcgctttaatctgggaggtggaggttgtagtgagctgagattgcaccattgcactccagcctgcacaagagcgagactctgtctcagaaaaaaaaaaaaaaaaaagttagctagctgaagagtataggaaagaatgggtacaggaaattacaggtgccaagttacagaggtgagagaaattatggtatctataggtaattgaaagtaattcagtatagtgaacattgaatagggctgggcggatgaaggcaaagcagaaaaaggaaagcagatgggccatggtaaggagtttatatctcctcccaagagcaatcgaagtgactgagagttttaaacacagcagtgaagtgaattacattaaaaaaataagaacttgggctctagaataaaaaacggatataggaggaaggcaggagtcacagtaggaatatcttttgggaggctgtgacaataatccaagtgagaagtaatggcaacttgagtcggttaattgtgttgagaatggagagaagttgacaggttcaaaattcatttttcttctttttttgagtctcactctgtcacccaggctggagtgcagtgatgcgatcttggcttaccgcagcttccacctcctgggttcaagtgattatcctgcctcagcctcctgagtaactgggattacaggtgcctgccaccacgcccagctaatttttgtgtgtttagtggagatgtggtttcgccatgttggccaggctggtctcgaactcctggtctcaagtcttccgcccacctcagcctcccaaagtgctagaattataggcatgagctaccacacctgacctcaaaatacatttaatagagcaagcatgagccactatgcccagcctcaaaatacatttaataaaccaatggaatttgaggtaatgatgaaagacacatgtcaaggatcattcctgtgttgttggcataagcaacagggatgaaaagcattgaggaagagcaagattttgggatgcgttgtcacacagttgattttaggtatgttaagggagggagacctgtaagacagcaaagtggaggtggtgcaagaattagttgtgttggctgtagcacagaggacagtttgagttaagagagttgggactgagaatcccgaggaactcttagtgttgaacatttgcgtggaggaggggacaccaaaggagttgccatagacatcgaggaaattaggaggtgtggtgtgcagaaagccaagtgaagaacatgttttaagtaggaggatgctatcaactgttttaaattctgctgagagtttgagaaactgaggacttagaattcatcattagatttggcaatgcgccaatcatttgtaatcttttaaacaatagttttgctgtactgggtagcaaaagagtgatttgaggagtggtcatttggagcatatgctattcaaacagagaagagtccacgggctttggtaacatgaaggtcctataaccatagcaagagaatgaggtgggtggaagtcatattaacgtgaatagaggagtaggttagatctgaggaatgtgggaacagagacagggtctcattatgttgcccagcctggctcagactcgtggcctcaagcgatcctcctgcctcagcctcctgaatacctcgggtttcaggcctctgcatctggcttgaaaacaacattttctcagaagcttgttttagttgttttagaaataacgaaggcatgtgtaaacaactgttctagaagcttagtttggaaagggaacgtttattgatgcatataacacttatatgttgggtgcttatgtgtcaggcactgttagagttgctcgggaaaatttacaaaccaagcaaaccatgccccttcatttcctttgggtgaagtgagggagccatgtggttatctgaaggaagagcttagcaggattagagggaagaaagtgcaaagcctcctagggtgattggctggctcttttggaggaacagtacctataactgaatgaaatgagtgagggtaagagtggcaggaaatgaggctagaaaaggagcttgggccatatcacgtagggcctcgtaggctgtgaatctgacttcatttcttattaatgaaaataaatacgatgatgggtgatgggaaacccatagaggatttggagcagaagaatgatataattaaaattttattttagaaatatttttctggttgtcgtaagaggaaaaatatttagccccagggcattttggcagagagttaggaggctattgtaacagcccaagcaatagacaataattgtttggattaggcgggtagcaatagaggtgatgagaagtcgtagcttctgtaggtatttggaagatatatattgtgaaggatttgctgatgaattccctgtaaggggtgagatgtaaagattcatagaacattaagatattttggtcagatcatctgatcaatggaaaggtcagttatagtggacagattatgagaagaacaggtttgggtgagaaaactttagatttcagtgttggatatcctaagttttagatgattattgatatccaagagatatcaatatttgggatcaatttgggaaatatgatcccaaagttcaaggttgaggttggagatgtaattcagatccgatggtagttaaagcagtgagactgaatgagataaaatagggagtgaatgaaataaagagtaggtgtgatattgacctcaagggcacaccagcatttagaggttgggaagatgaggagagagcagcaaagaggactgggagggccactaatgaaggagggaagtacaggaggtgtttagttctgaagccacctgaagaaaatgtttggaataggaagaagttgtcagttgctttaaatcattcggggaggttgagtgagatgagagtctagaactaacagttaggtttgatggtgtggaggccatcagtaaccttttctttcttttttttttttgagacagagtcttgctcagtcacccaggctggagtgcagtggcgcgatctctgctcactgcaagctccgcctcccaggttcacactattctcctgcctcagcctccggagtagctgggactacgggtgcccgccaccatgcccggctaatttttttttttttttgtatttttagtagagacggggtttcaccatgttagccaggttggtctcgatctcctgacctcgtgatccacccgcctcggcctcccaaagtgctgggattacaggtgtgagccaccgcgcccggcccaagagtaaccttttcaaaagcagctttgctctactgatttgggtaaaagcttagttgcagttggtttgggaggaaatgggagcagaaaatttgagagagtgagtgtagacaactctttcaaggaatttcgctataaatgggagtagagatctgaagactgaataattagcaaactgaaaagtgggaagacgtaattctcttattatttcatttttcttagtgaaataagaggtgaagttctctgagtaataggagggtcaaacaggtgttagaagttcacaaagaaaggaagaggtttgaaatagtcattttgagagtgggaaatgtagaagaattaacagtcattgctgagggtgcgtttgaaatctgtcatgagtttaaaataacttgtgtcatcatcgatgtgtttattttcaactatattcaactgcttgggtgtaggcatcaggtaggtaaaaaaagtgggttttattatgagtagaggttttgccacgtaattaccatggagggagggaagagcaaaggagttgagagtatagatacaaaggaatgattactgtaatgtgggtaagagaggaatggaaggctcagtgggcagtgggagtagggatgttgataggtaaggaaaaggtgataggatcaatgcatttggttctgcaagtgtcaaagtattgttggggaaagcatgctggaaggaaagatagggatgctggtgttctcagggtggaaggcttacagttgtagtctggaagtggtgattttattggcaattataaggtcaacggtatgactatggaattgagtggctaaggtctgttgaagaaaagattgtcggaaatgcaggggtcaaggaactggcctgtggatgttgaactcactggcagtgatcaaggaatagtagtggagtgaaagtagttaatgaatcaggcactaagatctccaagggatgaaaggatgcagtttggagatgacaagataactgtagtaatcaggaatagcaggttttgtagctctgtctcataggcctcagaggagatgggcttttgaaggacaagagaaatgatgatgaataaattctaagcaggggaagtgtttgggaaagcagggcaggctttgtgctgttgatggcaaatgatgtaccagacaggatgaagttgagaatttggaagttgatcactgattagaaaggcttacattttattttggccgggggtggcagctcatgcctgtaatcccagcactttgggaggccaaggtgggcggatcccttaggccagaagttggagaccagcctggccaccattgcgaaacactgtctctactagaaatacaaaaaaaaaaaaaattagctggtcgtggtggcacatgcctgtagtcccagctactccgggggctagggaatgagaatagcttgaagccgggaggtggaggttgcagtgagccgagattgcgccactgcattccagcctgggtgacagagtgagactctgtctcaaaaaaaaaaaaaaggaagggcttacattttattttggtgctgactgggaatgaaggcaatgagggatgactgttggagaaggctgtgcttactaaacagtattattaagtagcagcatacatggtgttatactgacttctgattttgcaatagtacagacaggttcagattctcatttccaccttctccttctgcctaggtgaataactgctgggttatagtacagatgactgcagatcatttggaatttactttaaatgtaaacagtaaaaatttgaaagagagggaaagtgattgaggcaatttggggattgaataagaaggtctttttgttggaattcatttaaggaaagaaaatgaaaatttgatccctaatattatttaatgaagtggctaaatgaatatctctgctttgtggtttgaaaattaatattgattttttttccccctagaggaagaaatcctacttagcgacatgaacaaacagttgacttcaatctctgaggaagtgatggatctggctaagcatcttcctcatgctttcagtaaattggaaaacccacggaggttaaatattaccttttttttttttaacttaaatcaattctgtttatttttttatcacattttcctatatgtgaagaatactattcattaaggctgactcatagaaatttgcttgaatacacacacacagactgatgcataaatttgagaaatatctttccagttgttgaatagtgaatccaaaggtttaagccttttctgtctgctttgtaggatgttttatgaaacaaaggaatagaaattgtattcatattatacattttgaaattatatctatattatattttttgtcaaagcaaaataaattatacattaaggaaaatatttaagattcaaagttgtcattttctttctgttaatgagtatctttgatttaataacatttatagtttggtcacttgaaatctatagtgaccaaaagcaatgtcatatttagtagcctcatttctgttactatctgattattacttaagaattctacttaattaatagattattagaacaaaaggcattccaattttagagattcttttatggttaaagcactaggtaacttaaaaaatttggatcaaatgttatacagattaatagaccttggaatacaggggctatgtctttttggaatcagaccttgtcctggccttaattgcaggatgacttccttattaaatctctaaaagcaggaatgctctggaacaatgaacaattagaatgtggtaatgtaattttgggccaaaaaatactttgtagaaatgtgattctcttacttggaatagaaagaattctgactcgaaaaagtgcagttaatgtatgcttttctgggtaagatttgtgatagattttgattgagatttaaaaccatgatatataaatttagcttttttgtcaaagtaatttgccaccctagaatttgtgttggtaatttttaatgcaacttggacaatttctgaaagatgtaactttcttttttttgagacgagtctcgctttgttgcccaggctggagtgcagtgacatgatctcaggtcactgcaagctccgcctcccgggttcacaccattatcctgcctcagcctcccgagtagctgggactaccggcgcccgccaccccacctggctaattttttttttatttttagtagagacggggtttcaccgtgttagccaggatcgtctcgatctccggacctcgtgatctgcccgcctcagcctcccaaagtgctgggattacaggcgttagccaccgcgcccagcctgaaagatgaactttaaaatggggaaggatactagtaaagccatttcttactcatgtatacatttttccctccatgaaattagagcagccaccttttacatgacttttacatgcatttcagatttttgtactagcaattaaaatatctactggatgtaaatcacatgtgcttaatgctttgcttcataatatctgttgaagtcaattaaaatatagagacagatctttaaattgaacatgttttatttgggaagcaagaattaaatttgaggcatatacacagactgggtgtccttggtatctctgaagaacaaagagaagtttggaggttatagaaaaaggaaaatgtgacattgtttttccagaaagttctttggcactagtaaattttggggagttggaagctctgatgggttagtgactgtggtgggtaaaactagtcttagagtcacaacaggttgtttcagtatctattagataaaacaggttttaggttacaataggcagtttcagcagctaggcttgcagaaaattacattcttagagtaatgttatgtgccttgagtgcttttttccccttggcccttgactctgatttagttgggtatgacaagaattatcaatttatataattactttttacatattgaagctgaataggttttcttaaaacttggaaatgggaaatactgggtcttgtgaagttttagtgtgaaaacgataactagtctcttatttcatgctctttgtaacaagtctacagtaatacctaatgtatctagatgacacctcagaaccaggagggaacaaaaaagacctctgagcagtcaaaataatgctataagcatgtattccagcttactttcggcatttctgtggagtgcaggaggccacattttgttcatagatccagtttgacaagcttgggtactgagttaaagtgaaaatggtgtaaataagtaatcatattcacatgacagtaggtggaagtgacagctgacaatctgaaagagtggacaaaactataaaaattagaactaagaactcttaaaatagaacggtttgaagtttgttacagaagggagcagctttatgcttcagtggactctgaaggtattggcagtgtatagtactgcttagtcattgatttaaattcggtatatatctcttctattgctgtcatgtacttgacattctgctgggtgctaaggctgtctgcaggctactaatatgcataataacaatcctgaaaaagaaggaaaagtatactgtgccttactgaagaaggcaggacagccgttggtatttgttagagtaaatattagttatcttacataaagcatgttatattccctgatgtcagggcctgataaatgagcccttacactcttgatagtcaatctgtgccactgttgctgtgtttgtatgttacaccatttcctgtccatgtaacagttaaactgtatcacatatctgttcctactaaactatttgcatataattttaacatttgagtggctgtatataaagctaaaagttctttataagatttatagcatcttagaatgtttaaattagataacattagtgtgcttttagtttttgaatttaattttgctcttgattttgtttgtgttaatgtagactttgtctacgtaagcttgagcccaactttggagtggtgttttcagtgatggaagtaactggaaataactcatgaaaccacttagtacttttgatagtttattcccatgaaggatcaaatttttacttgagtcattaatataaaaatttaaaagacatgtcagattttattaagcatggattttaaatatataaatattagaagacctaaacaaaatcgctaatgaaagagtaaaacatgtccctgcctatcatactcccttcactttcactgatttctgcttttatgaagtactttaataagctctacaacaaataaacaagacattgtgcctcattttacactctagcagtggttttccattccaactaactagattgggtttataatatagtcatttaaacttacttagttaaaatgttatacattagcaactgcaattaaggagctaagaaattcagctcgtatttatttatatgcatcttatccatagtttctcacttgttatatttgcctactgatggcaaattgattttttctgttccaaaaatgtagtgttttgagatttttggagatgcaaaacagcatcattttcaaattagatcacaaacaatcttacttgttgcagttgagactagtaattgatcagtgaggtgaaaaaattaggcaaaacggtatcatcaaaattttctttctttttttttttgaaacagagtattgctcttgtcgcccaggctggagtgcaatggcacgatctcagctcagctcactggggcccctacctacgggattcaagggattctcctgcctcagcctcctgagtagctgagattacaggcgcatgccaccaagcccagctaatttttgtatttttagtagagacagggttttgccatgttggccaggctggtctggaacttcagacctcaagtgattcacctgcctcagcctcccaaagtgctgggattacaggcatgaaccaccgtgcccgccccaaattttcttttaacttaaagtgttaatgtttgtttgttcccaatatttttatatatgtcaaggctttttcattatatacaggccagctctttggagttctgcatagtgtttcttgtttaaaccacacctataatgtaccatctacaatttccaattctttaagacagagtgaaaaattaagacacctgaagcaatctgagtgcggagtcctaggcattatgattttccttgacacttttagggttcttttatcacagtttatcaaacacctttttttttttaacaaaaaacaaatttacaaaatctttccatgtattcaacttagaatttaatgaaatagggtttttttttttttggtggtcatgtatcatcaactttctttacatttaattaaattaatcaacaaaaaacatatagttgacataaacaaatttgggaccaagcactactgactcttagtaaacatacaagtcaactgttggtgcagaagtgccttgatgctagagagtagcctgcaagctgtaattatatatgggcattagggaatgaagaacagccttaatactattgatcttttaagtgaaggtcagcttagaaagcttttacttgttaaaaagcttcacagtttgtccttgtagttaatgcaattgaagttgaattaatctttcttaattttttttttagggtttctatcttactaaaggatatttcagaaaatctatattcactgaggaggatgataattgggtctactaacattgagactgaactgaggcccagcaataatttaaacttattatcctttgaagattcaactactgggggagtacaacagaaacaaattagagaacatgaagttttaattcacgttgaagatgaaacatgggacccaacacttgatcatttagctaaacatgatggagaagatgtacttggaaataaagtggaacgaaaagaagatggatttgaagatggagtagaagacaacaaattgaaagagaatatggaaagagcttgtttgatgtcgttagatattacagaacatgaactccaaattttggaacagcagtctcaggaagaatatcttagtgatattgcttataaatctactgaggtactaaataaagaggaagcacatttttagttattagtaggttctggcagactttattcccgtaaagagacagatagtaaatattttaggctttgtgggacatacagtctctgttgcagtaactcagttctgttattgtagtgtgaaagcagccacagacaaatgtaaacaaatgtgcctgtctttcaataaaactttatctacaaatacagatagtgggccacatttggcttgcgagctgtagtttgctgttcctgacttagtatgatatgcagcattgtgtagtggaaagattttatagtatcaacagacatttgtaggagtttgctattttataatttcgtatgcttttttcataatagatgtctctgctttttgtggattctcttcatatctactagtgtttactcttctgactttgatttttgggggtgtattttatttctttatacagaatttttttcttttttctttctttttttgagacaaggttttgctgtgtcaccccagctggagtgcagtggtgggatcttggccccctgcggtcttcaactcctgggcttaagcgatcctgtcacctcagcctccctagtagctgggaccacaggcctgcaccactacactcagctaatttttgtattttttgtagagatggggtttcgctctgttgcccagactggtctccaactcctggactcaagtgatccacctgccttggcctcccaaagtgttggaattataggtgtgagtcactgtgcctggcccagaatttctttacttgctcatgtgagagagtttctaataaactcctgatgcttttgcttgacactatagttttactgtcatctcagagtcagattttttccttaatttcttcattaaattgatttcttaatttctcatttgttttgcattagtttacaaaattacttaagatgcctatattctctgaaattttatattttatttcacgataaataagtttaaaaaattagatttgaccatttaattagagttatttccccatcatttttctaatggcaacaataattttagcatttgagcaattctctgtattttggtaactattagtaatcacttttatcagtataaacatgcatttcattttaaaatggttttcaaaatattctcataccaaccattcataaaagatgttccccttctgggaaatatcagtttttgctaacatctgcatttccctttgattttctaggaatttcttattaggtatacactttaagtgatatgtttcatataatattataggattatcaggatttcatgattttttttttttgagatggaatctatctctgtcgcccaagctggagtgccgtggcgcagtcttggctcactacaacctctgcctccccggttcaagtgattctcctacctcagcctcccgagtcactgggattacaggtgcccgccaccacacccggctaatttttgtatttttagtagagaaagtgctgggattacaggtgtgagccactgcacctggccttggatttcgtgatttgactgacatcttttacaccaattattgccatttttttattgggtactaattattagtattgctttctttattcgttaaataagaagtaaaagaacttttaaaaaataaaataactttttttcctagtacaaagcttattttcaattttttttattgcttaaattttgcaggttaattaaggctgtacttctttttcctacttcctgtttaaatatttggcattttttgagggttttctttctatggatttttgtgggggatcccatctcgttggacacttggttcctggagattgccaaattattgaaaagtttcctcatacccaaacattggcaatagactgaataaataacatctctgacattatttttcaattatatagagaatgctttttgtaaaatactgatttatttaaagatattacaatcatagtagttttttgcaatcttttttaaatcagtggatgtcaaggaacaactattgttctttgtacggcatttttcaacattgtgaagagttcttatactcaaaaagtttgggagacacagtgtgacattgtttaacctgagttgaacttgtcattttgtattcttgtttagagcagggattttattttgtctctttatctaactttgtattcctaactatttctttctttctctttggttctttgtttctttgttcattcttctctctctcccttttttatctatcatataaatatgtaaatatatattatatatccattagggaagaggaagttgtctaaagatatctagtatataggagctttgttctgcagaaaagaggatatgaagtcaattatattggaaattaatgcttaatactttttttaaagcatttatctcccaatgataatgaaaacgatacgtcctatgtaattgagagtgatgaagatttagaaatggagatgcttaaggtatgtttacaattataaaaatattacttcaagttctttccaaaggacatttaattaagtaaaatattaactaattctaaactaggttctaccacaatgaaattgctactaattatgtaacattagatttcacattttccaattcatgtttctttcatgtagtctataaataatgggttagaggtaatttactaattttaaatgtgctttccttgttccttcttattttttattttgaagacagggtctcactctatcacccaggctggagtgcagttgctccatctcggctcactgcaaccttcacctcctgggctcaagtgatcctcctgcataagcctcccgagtagctgggattatgggcgtgcaccaccatgcccggctaatttttatagttttagtagagacagggtctcaccatgttgtccttgctggtctcgaactctttacctcaagtaatccacccgccttggcctcccaaagtgctgggattacaggtgtgagccaccacacctggccttggatttcatgatttgactgacatcttttacacaaattattgccatttttttattgggtaccaattattagtattgttttctttattcgttaaataagaagtaaaataacttttttttaaaaaaagaacttttttcctagtaaaaagcttattttcaatttttttattgcttaaattttgcaggttaattaaggctgtgcttccttttcctactttctgtttaaatgtttggcattttttgagggttttctttctatggatttttgtgggggatcccatcttgttggacacttggttcctggagattgccaaattattgaaaagtttcctcatacccaaacattggcagtagactgaataaataacatctctgacactatttttcaattatatagagaatgctatttgtaaaatactgatttatttaaagatattacagtcagtagttttttgcaatctttttaaaatcagtggatgtcaaaaacagctattgttctttgtacagcatttttcaacattgtgaagagttcttatactcaaaaagtttgggagacacagtttgatattgtttaacctgagttgaacttgtcattttgtattcttgtttagagcagggattttattttgtctctttatctaactttgtattcctatttctttctttctctttggttctttgtttctttgttcattcttctctctctcccttttttatctatcatataaatatgtaaatatatattatatatccattagggaagaggaagctgtctaaagatatctagtatataggagctttgttctgcagaaaagaggatatgaagtcaattatattggaaattaatgcttaatacttttttttaaagcatttatctcccaatgataatgaaaacgatacgtcctatgtaattgagagtgatgaagatttagaaatggagatgcttaaggtatgtttacaattataaaaacattacttcaagttctttccaaaggacatttaattaagtaaaatattaactaattctaaaccaggttccaccacaatgaaattgctactaattatgtaacattagatttcacattttccaattcatgtttcttttatgtagtctatgaataatgggttagaggtaatatactaattttaattgtgctttctttgttccttcttttttttttttttattttgagacagggtctcactctgtcacccaggctggggtgtagtggtgccatcttggctcactgcaaccttcacctccagggctgaagtgattctcctgcatgagcctcctgagtagctgggattacaggcgtgtgccaccatacccggcttatttttgtattttttgtagagatggggtttcaccatgttgcccaggatggtcttaaactcctgggctcaagtgatctactggcctcagcctcccagcgtgctggggattgcaggtgtgagccgccgcatccagccctgtgttccttcttgtgttactttcttgtaattttttcctggaatatgggtagtgatttggctctccagtattgaaattgagtttcctttcttccaattcatgtgtatccatttttatttggaagttttgtttttatacattcaataatcatctttactttctttggtattatttactatggatattttatattatataattttcaaatggattaaatggttcagttttactcttattattgagattgaaaatactagtttataatttatatattttctattcctttacctctaatttctttgtcaggtgttactaaccaaagatgtataataagaaaagccaatgtagctaaattaagtaaaaaatgaagaaaaacacagaagttccccattatgcatttttttattcctaatctttaggttgatgagatttttttatttttatgaaatgagattaatttattgacttttttagttttgaggccaagtaatgagtagtgagtaagaatgtatattctagggccaggcatggtggctcactcatgtaatctcagcactttgggaggccgaggcaggaggatcacttcattccaggagtttgagaccaacctgggcaacatggcaaaaccctctctctccagaaaaatacaagaattggctgggtgtggtggcatgtgcctttagtcccagctacttgggaggctgaggtgggaggatcacctggggagcctggggaggttgaggctgcagttagccatgaccatgccactgcactctagcctgggtgacagagtgagaccctgtctcaattaaaaaattaaaaaaaaaaaagtagattgtgaattcagatgtaggtttgtatcccagcttttccagttagtatctgtgtgactttggggaagtttcttagcatctttgatactcggttaacagttgtaattattatttaaggtattgcttgagaagagcttagtatagagcctgacatttagtaagtgtttaatacatattagctaacagtaaaactagaacataaatactgaattgtattttgttattaattatccatttctctgagaagtactgttccaatagtacatttataggaaacttgtggacgtctacaaacgtatacattaaatctcttagaaggcaacctggatgcccatattagagaactctattttaaacatgcattctaagtatgtttgtggacttgaataaaataaaacaaacagaaacacttctttcttctgccttcaggcttgaaatgaacatacttttttttaaaaaaaaaccttcaaaatgaaaatattaaataaaagatttaataaaaagagaaagtaaaaactgtagtttaataaagtcttcctgtctcttcatagttaaaaaatgttatagatgaaacaattttgaaatattcttgaaatagataatctttatttaggggagaatgtcagatactgtcaagccaaaataaaaacaaataactttatttcatgtttgtaaaattccttttctaaaatgatttgaatcttttgttgttttgacaattccaaaacacatttattgtttgctcatagtttcagccttattcagaaagaatgcgactgacacatgatatagagaaacttgttccaaaaataacattaaaatccacgtttactacttgagaatcgaaaatattgaggtgcaataaagaataaaatgttttaaattatccaaatttaaaatttatgatagctttccccaggggcagtttattatatgctattaatgagccttgtttatgctggaaatgttccatctttggccttgcgccttagaaaccattcatgagcacatatttaaaccggagcacacatgttcttttgtagtatggcttgcacatctgccagctttcgacaaaattgtaggccctgttaataatagtccttttgtgtttggtgaaaaagatacgacactgtcagtggttttgcttttaagatttcttttaaactttcagtctttagaaaacctcaatagtggcacggtagaaccaactcattctaaatgcttaaaaatggaaagaaatctgggtcttcctactaaagaagaagaagaagatgatgaaaatgaagctaatgaaggggaagaagatgatgataagggtaagcactgaagtatgtttgaaatgactcacctgtgatacctaccactgactttaacttaggatccagttttggatggtttggaggtcagggactttgtggcatatagttaattattggatccttataagcttttgtctccttagtgcttttgtctccataaagcacaatcttactacttagaaaaatagagtaatagcattatgatgataaaaatatctttccctttgtttttttgtatttctccaaatcattatagctctcatttagaattattaaagctgagaactctaacaatgaacttttattgtttagtggttaattatcttgattctttgttttgccctttcttggccactcaggaatctttcaagctcactgtggacagggaaagtgacttgggtagagctaacataacttcattgtgctgtgcagttagaattttgaccaaagatgtgggtaactaacttttcctaactaaatgacatttaggtaactaaactaaacgagattttcgtaactaaattttggtgtaactacatttagctttaggtaactaaaacgaagattttattttatctgtggatttttttagtgcgggactaatgtaatttctgattaccattaattgaaggttggttatattataacatttggattggtatattgcttgccatggtttgttctaaatgttagcctttagaagtattcctgattctaaaacatcagttttttttaatagtcctggcaaagtgtgaatcacaacaaaattctaatacttaaaagtaatccaagtgtcacagatggtacccagaagaccagtttgtattggaattaaaaaatagaaaacattaacccatggtagctgtcactgtattctttcaaagaagccaatgaaataaactgttttctccctctatgtggtgtttttctacttgaacataaatgcacattttattttatttccagactttttgtggccagcacccaatgaagagcaagttacttgcctcaagatgtactttggccattccagttttaaaccgtgagtataatctcatttaatcaaatcacatatttagtattctctttaaaacaagggaaaaggcaaataacctgtctgcttaacagcaacagcacaacttcactatagttatacatgccacactgtattttctgtgtgactacaaaattatttcaaagtgatatttatataaaattcatttctgcaaattgtttttataagtgaggaaaaatggttttcctttaactgagcagttctgagtagaaactagtttaaagatacttataaataaatgttaatttaatactgacttgtttttcattaaacgagtgtctatgtgcctgttttgtgtatattacccagaacatgcagatgtactagaagttcttaatacaacaatttgaggaatagtgataatcttatctattttaatgtactcaaaatttgtttacatctaacaggcacatttttgtgaggattaaatgagatgaataagaatgagatgaacaagtaaatgtgaataaaactaataagcctgtgaaaatctagactggatttttcctattctgagaatttaaaatataatccactgaagtatttctttccttttttcttttgatcttaaacattttttatttatgtcttacatacagaaaagtgcacatgttgtagagatcaatgaattgtcataaactgggcaccctgtggccagcacttagttaagaataggtcagtaacagcatgccagaagaccacctctccaattgatttttcccatgatattttattaagaaaattttctaagatgtagtaaagttgaaagaacttttttctgtgcatgtctgtattcccaccacctaaattcaactatcattactatacttgctttatcacatatccatccattcatatgtctctatccatccattcattcattccagttttaaaatgcatctcagggtcaatcgaggacaccattacacttccacctaagtatttcagcatgtaaattattaacgagttaaatatttacttaacagttttttctttggtgtaaaatttgcacgtaaggaaatataaaactttaagtgtacatttgcaaattttaaatatacatgtgcatacccatgtaacccaaattcttatcaagagatattattatcatcaccacacagagttcccttatttcccttttcagtcagtccttgtccctgagcatttctcttattattttaaagtattgattcttttggatatctagtatgaagcttagaatctgttttttactttagatgtatgtagtgaaatttaatatatataccaaatggtagttgttagttagcttgaatgggacattggtcaaatggcattgtttgttttaaagttccaggtttgtgcatttatgtatgaagtttgaaaataaattctatgagaggaaatgaaaaattgaatggattttaatttgtaccttgggtttcttattaataaaacaaaatagctttttgcttttcaccttcaagagttcagtggaaagtgattcattcagtattagaagaaagaagagataatgttgctgtcatggcaactggtaagttgtacttaagcaaaacctaatcctttaaaaaaataaaacataaagagtttgaaatgcttaatctttcattaaactctcaaaatacaaatgcaactacaaatgatgtaaactatagaagagagtgaacaaagaacagatgctcagatttatgtatcaattagcttttaggaagatagcatactagtattgaccattcatctgtataagtacattgtaaaaagaaatgaaagcatcaaaggtttatttttatttctatatttttttcattttatttttatatttttttcatttcaaggatatggaaagagtttgtgcttccagtatccacctgtttatgtaggcaagattggccttgttatctctccccttatttctctgatggaagaccaagtgctacagcttaagtaagtcatgttatcattgccacaatatcaccctctttttttcttctgtgggtgaaacatctgatccatcatgcatgttaaaatctagttcacaataacacatttctgcaggtattgctttatctttattggtaataaatgaccctttagtggaagagcttaccttctttcttgtgttctctgtaattcaaagctaccaggtggccctgataaaatttttttaaaaaacattattactttatgctggtttacattgaatatctcaaaattcttttctctttttgttacccttgctttttagcttgataagaagtgtatacatggaagtatattttttatctatgaaacacttttcagcttcttcaacctgagcttgcaatctgttttaaattgatacataatatctttacatattcatggggtactgtagtattttgatacactcatatcaaatacacttgatcaaatcagggcatttgttcatcaacttgaacatttatcatttctttgtgctgggaacatttctaatcttttctttgagttattttgaaatacacagtgttgttgttaactatagttaccctactgttggttaatgagtacaaacatacagttagaaggaataggttctagcaacctattcctttaccccctgtcatcccctgctgccctgagcttgcagtctctttcaaagacccaccttaaaaacttgcattctgataaggcccttgaaggaatttgcttatcaagttagtaagtgacaaaaaagaaaattgcaaagaacaggaatataaattattatatttctttattctttctcacttaagagtgaaattgatatgtgtaatgtgtacatggtgccagaatatttgtttttcttcttatagaatgtccaacatcccagcttgcttccttggatcagcacagtcagaaaatgttctaacagatattaaattgtgagtaatttttttccctcaacttttattttggatttatgggggtgcatatgcaagtttgttacgtgggtgaattacatgttgctgaggaagttgtgagtaatttatgtcatttctaatcatgtggtcagatgtctgtggtatatgagagaattttgtatacaaacaaattttactaaatgcatgaaaaaaaaagtccatgattttaaaatgcactttcttttgtacctttgcaggactgttactttttaaatccttcaaacttgaagaaatctgttattctcggttcttgggctataagattagcattgtactcatagaattataaaaattttggttttggaagagaagttggagaatataaagatttgtctcattttatagatgagaaaactgaggctcagagacaagtaatttgcccaaaatcacacaatgactggctgagcagggactggattctaggtctcttgcccaaccaattctatcatgatgtaattcctaaggagaatgtcatctcagatacacatacacacacccattttgtgtgtgtgtgtgtgtgtgtatatgtacacacacacacaaacatatgtacacttatatatacatacacacacatatattaatatatatgcatatatatgcatgttctaattcagaacattttcatcactcccaaaagaacacccctgcccattaagcagttgctttctttacgtatatattagtatatacatacacacgagatacacatatatttactgagttttgataaatgcatacaaagatgtaaaccaaacctctaacaagatacagaatatcactgacactctagaaagtttcttcatgtccctccccagtctgtccttccatcctccatcctaggcaagccactgctccgattttctctaccatagtttggtagaatgccatataaatgcagtcacacaatattaactcttttgtgtaagacttctttcatttgctgtaatgtttctgagattctttcatgctgttgcatgtatcagtagttttttgttttgttttgttttgtttttgttttttcagagtcagggtctccttctgtcacccaggctagagtacagtggcgcaatcatagcttactgcagcctctaactactgggctcaagctatcctcctgcctctcaagtaggctaggctgcaggtatgttccaccatgcctggctaattattaaattttttgtagagacaggatcttgcttggttgcccaggctggtcttgaactcctggcgtcaggattgtttccagttttggattattacaaataaagctgagacacatataagtctttgtatggacatatggtttcattttattgatacatgtcaaggagtgggatgactggatcgtgtggtggatatatgtttaactttcttttttctgagataaaattagaaggcgatcctcctgccttggctttccaaagtgccgggattacaggcgtgaaccaccgcacctgatgcagttgttgttgttgttgttgttttaatatctgattattattttattgtatttcattgaatatagcacagtttgtttttacattttcttattgatagacacctaggctatttttctggttttggactgttactaataaagctgctatacacatccttataaaaatcttttttgtgaacatgttttctttttttctaagcattttaaatcacctttattgaggtgtaattgacttacaataaattttatatgctgagaatgtataatttgataagttttgacacaggtatgcactcatgaaaccatcatcacaatccagataatgaacatattcatcacccacaaagtttacctttttgttttaaccccagtcaccgggtaactgctgagctccttcctgttactgtagactagtttgcattttctaaacttatatacatggagtcattcatattttatgtgctcttttttgtctgatttaaataatgcagtataattattttgagattcattcatgttattacagtgattaatagttcattcctcttattgttaagtggattacattttatggatatccaacaagttgtttatccattcacctgatagacatttggatcgtttccagttttgggttattacaaataaaactgctatgaacattcgtatgtaagtctttgtatggacatatgttttcattttattatatatgacggagcggaatgactggaacatgtgatgcatatatgtttaactttcttttttctaattgagataaaattcacagaacataacttttaccattttaatcattactaaagtccagtgggttttggtatagtaataatatataaccatcataattaattccagaacattttcctaactcccaaaagaaattccatacccattaaggagtcattccctattttcccttttcttttctttctttttttttttttttgagtcagggtctccctctgtctcccgggctggagtgcacttgcatgatcttggttcactgcatccttgatttcctgggctcaattgatcctcccacctcagtctcctgagtagctgggactgtaggcatatgttaccatacctggctaatttgttttattttgagtggagatgagattttgctatgttgcccaggttgctctcaaactcctgggctcaagtaattgtcccacctcagccttccaaaatgctgggattacaggcgtgagccactctgcccggcctattatctctgttctgcccacttccaaccactaatctactttctgtctctatgatttgcctattctggatgtttctataaattaacttatacattatatggccttttgtgtctggcatcttccacttagcatagtgatatcagtacttcattcggtctttttttatgactgaataatattccatagtatgggcatacacattttaaaaattcattcatcagtgatggacatttgggttgtttcctttttggctgttatgaataatgatgctgtgaacatttgtgtaccaatttttttatgaacatacattttcaacgcttttgcatatatgcctaagagtggaattgctgggctatatgctaattttttaagaaactatgaagcttttgagagtgattgtatcatgggatattcccaccagcagtgtatgagaggtccagttcctccccatccttgctatcacttagtctggctgatctttaacttaagccattctaatagtatctcattgtatttttagtttgcttttccctaatgactaattatattgagcatttttcatacacttattggccatctgtatatcttctttgagggagtatctgttcaaatcttttgcctattttttcttagtgagttttgatagtcatttctatattctgaatataaattatttatttgatatatgctttgcaaacattttctcctagtttatggcttttcatactttccacacagttcttttgaagagcagcagtttttcattttgataaagtccagtttgtcgattcgttcttttagggattttgcttttagtgttttgacccaaggtcacaaagatttgcttttatgttttctcctaaaagttttatagttttaagttttacatttagatttacgattcatttttagtaaatgttgtctattgtatgaggtattgattacagtttatgtatttttcacatattgttccagctccattttttaaaaagactatgcttttacactgaattgactttgtacctttgtcaaaaataaattgactacatatatgtgggtctattgctgcactctctattctgtgttctgtggatctatttgtctgtcttgattggtgtcttgattactgtagctttataataaacctggaaatcaggtagcgcaaggcctcttgctttgctcttttctttcaaagttgttctggctattctatgtcctttgtatttctgtgagcatgtcagcatcaccttttcaacccatatgcctgctgggattttgaatgagtttaccttgaatctagatatcgaaacaattagctgtcttgatagttattgtcaccgttttataccgaagaaactaggcatactaaagtaacttggctaacatcacttaccttgtaagaagtagaactgggctgtttgacatcagagcttattctttataccatttcctatgttaattagaatacaatattaatttcataaaggtaaaggcatatctgttttgttcctatttgattccttgtgaaagcacaatgcctagcgcacaatagacacttaaacttatctgttgaatggacaggtgaatgcttttaaagtctttccatatagaaaattaagtttcattacatttgacttgatctaggttttcatttcatagaatggagagcagactctgtaaatattttgccccagacctagctttattacaaacattgtcttaattaggattctgtctacccagaatagaaattaactcaagctagcatgagtgtatattgaaatttatattaaggataaaggaatgtctcatagatcccactcaaaagaaattagccagcccttaggaagagactggaattgggtttggaaaatacaataggtctttctttttatctgtagtctttagtgagtcttcctcatttttctctctgaagagataagcattctctgcatatatatagcattcttttagattttcgtgacataaagtattatttaaactttcataaggtatcttgattttaagttgtaattccttgagatgattgttttctttattgttaatatgtttcccttcctgtttttttttttttcttttttcttttgtttgtttttacagaggtaaataccggattgtatacgtaactccagaatactgttcaggtaacatgggcctgctccagcaacttgaggctgatattggtaagtgataaagaaagatctctgtaaatacttactgagttaatatttaaagttaaacctatggatggacactggatttcacttctgttaaagtttatttcaaacattacttcctccaggaaatctctgactctctaacttgctgtttcacctatcttatcccatgatactctataattccttttgctatagaaattaggctctgttatcataattacctgtttatatatctgttttcttctgctaggctataaacttttcaagggaaaaatatcactttttaaaatttatgtttccccagtgcagtgcttggcatataggcacttaaacatattgttgaatgaatgttgaatcctaggttctgtgaaattttaatttacttgtttttcatgttctgtatctaaattaagtcagtgtagtggttttgtaccctctttgttcataagaatcacttttcaaactttaaaaaaaatgtaggtaaccaacacccaactctgaaaattctgatttaacaggcctgggttggcacctggcattggtggtttctcacaggtgattctgatatatagcccgggttggaaaccacagtacctttgattagttgccactagtgagtatgatttattacaaaaaccaaaaacttagataagtcacagtttatttcctagaacgtgtaaatatagaattagtcaaaagctgatagcactttttttgtacttaaaaatattttaagcctcagtatagtgagacctcatctctacaaataattttttaaaaaattggccgagcctggtggtgcatgcccatagtccaagctacttgggaggctgaggtaggaggattgtttgagcctgggagatgaaggctgcggtgagccaagatcatgctactgcactccatcctgggcaacagagcgagaccatgcctcaaaaaaaatttttttttcttcttggtggttaggcttaactatccaagaattgcaatcatggcttctattgcaaatgcccctatttcccaccttcagttggcctaaccaaatttaatttttcaatatcatatgatctttttgtataattatgtattcaaataattccagataggttaggttttcgaattgcaacgtctcatttaatggttactttcatataactgtaggaaagcatttgataatttttccaacaatgtaatgaaaacaaacttgtatcttttttattatgtgttaaaaccaacaaaagaatgagggcagcaattaacatttcattaaatatattagcaatgagtacatttatgagctcttaaactcccttattgacatactgtattttttgcctttaatggacaatgaatttgatatgtttcctaataggttgtatgaagttattgtgaatatttcactttggattaagaataactaccctatatataaatttcatggttgtattgcaaaagctggggtctatgtccatagtggtttgggtacgtttttactatttgctttgtttctgtgatagtgttaaatgaataataagcttaagtatttaagcaaatacttaatacttctgacaagtagttagaactctctatttttgtttttttgtaatggatgagttatggacactgcaattattagagcagcgtactttgcttatgatggatgaaaatgttctctggttgactcagtgttgaataaaaagggatacatgaaataaaaattatttttgaaatattttcctttgccttttgttgcgggaaattgtacaatgcttgcaaaaatgaatatacgcaggatattatttgtacagcagtctgacatttagctaatcagattcctcatttttaggtaaatgttaaattacttaagtagtctggatttttaacagaaacagcaaacatagttttatagggaggctccttaccaaccagacttttaacttaagtgaatgttggcaaaagcttgtctaaactgatttccagggataaggtttagctccattaaaagctagtttgtcaaacctgtaactaaagctttttaaaaaatgaaagttttaaaagagaccatcattctgttttaacctatttaatttaaaatctgggctgaagtaggagtattgcttgaacccaggagttcgagaccagcctgggcaacacagtgagaccccatctctgaaaaaaaaaaatgagctgagcatggtacctgttacagtgctagttatgaaagaaagaaagagagagagagagaaggaaggaagggagaaaggaaggaaggggctgggagtggtggctcacacctgtaatcccagcactttgggaggccgaggcgggtggatcatgaggtcaggagatcgagaccatcctggcgaacatggtgaaaccctgtctctactaaaaatacaaaaagaaaaaattagccgggcatggtggtgggtgcctgtagtcccagctactggggagggtaaggcaggagaatggcatgaacccgggaggcagagcttgcagtgagccgagattgcgccactgcactttagcctaagaaaaggaaggaaggaaggaaggaaggaaggaaggaaaaatcagtcactcactcaggtttagtttcaaaagccaaaacagtgataatattgaattttttccagccactcagtagtacccagagaattttgatacaaataactgactttgaccccatgtttagtaggttttttttttgtttgtttgtttgttttttttttttgtctttcttctccacactctcttaggactgttgtagcttgtaatgttagtgaattgtaattgtttatttgcatgtctgtctcctcttttagaattgtgaactcctcaggtcatggattgtattttattagtctttttattcctagaaaagtgtttggataataatagatatttattaaccataataggagtagtagcatttttgtgtgtgtgtgccaggccctattttagcattttatgtgaatgatataatttaatttttagagcatctagaaaatgttaggtaccattattatccacattttacttgtgagaggactgagacttggaaagcttaagtaacttgcttaaggtaatacacatggcagatggtggagccaggttctgcatctgggcagtctgactttagagctttttaatcatcctcctcctagtgtccgaacattattaatgctcagagaagtatcaaagaatgatgatactcattgagggaaaaaattattcttaagtatcaatttgttaattgaggacaaaagcactactgttactactgtgaaaaatctgaaaacattgtcacggatgattttacaataacatccttttctgacatgcattacaacacactattgattccgtttcaatgtttgtgtctggtatgggggcggagtagagaggctactacaggaagaaagaacaaataacatttcttcttactactttgtgcatcatgtgatttagctcctcccataccattttacattagaaaatgtggctgtcctcctgtgctctagtactggcatttcagaggactctttgcaatatgatatgtgatcaatcatggatggcgatgcagttaatttcagtagaaatttgctgactctttttatctcttttaatagctaatgcatgagataaaattgaaggtattaccaaggagaaatgcaggtggatagttttggaggcaaagtcacagtaagcaattcatctctccaaggaatagtgatgaaagctgagatccaataaatgtcttgtttggattaatacataaatatttccttttaaaattcttaaggcttttattcatatatctcccctctccctatttccaataatgatttttggtgttaatatgatgatatttatgcttctgtttttataggaaccaaatactttgatttggttatttattctcctttggagatgtagatgagtttattttttcctttcgagctttatcttttcctttatgtgtttttctttttttacaggtatcacgctcattgctgtggatgaggctcactgtatttctgagtgggggcatgattttagggattcattcaggaagttgggctccctaaagacagcactgccaatggtaagctttgccaagtctgatgtcccgaaattacattcttaataaggagagcattcaggattggggagtggtaaagaagctgaagacttcactataaaagagcaaatggataatgtaaaaagagaactatttttttaaaaatgctaaagttggtatataatctattgaggaatataatagaacaaggcttgacaaaccttttctgaaaggaccagataataaatatttcaagctttataggccacatgtagtctgtatcacatattcctctctctgttttttcttttagtaaccctttaaaaatataaagagttacatttttcactggtgggccataacaaaacaggctgtgggccatatttgtccgaatgtcttctcagtgatctttcatccgtatgtccttttactctaggatgctgtgaaatcctggttaccccttcttgtatcacattgaaaacctaaagtttgaactattctatagaaattttattaaagcttttggtattagaatttccctttcttccctaattataaaaaatagcaaattttggccgggcatggtggctcacgcctgtagtcccagcactttgggaggccgaggtgggtggatcacctgaggtcaggagttcgagaccagcctggtcaacatggtgaaaccctgtctctactaaaaatacaacaattagctgggcgtggtggcaggtgcctgtaatcccagctacttgggaggctgaggcaggggaattgcttgaactcgggaggtggaggttgcagtgagccgagattgtgccattccactccagcctgggcaacaagagcgaaactctgtctcaaaaaaaaaaaaaaaaaaaaaaaaagtgaatttttacatgaatattctacatgattggcatatttacatgaatggtttaaaaacccacaataatagcactgttttattttttattttgaaaattgtagattcacaagaagttgtaaaaaaaaaaatacctatatagaggtcctatgtacctttcatccagtttcctgaacagtaacatcttgtgtgactatagtacaatatcaaaactaggaatatgacatttgtacagtatctagagtttattcctatttctctagttttgtaagtactcttttgtatggcatgtgtattgttctatacagtttaatctcatgtacatttgtgtaactaccactgcagtcaggatgccaaatgttcccttaccacaaagctccctggagctgttcttcccacccctggccctagccactggcaaccacaaatctggtctctatctctaaaatattatttcaagaatgttatatacatggaatcatgcaatttgtcaccttttggaattagtttttttcactcaacataactaccttgagatctatccaagttgtttgtggtcatgtgttgcctaacaacagggatatgttctgagaaatgtgttcttaggacattttgtggttgtctgaacatggacttacacaaacctacatgataaagcttactgcacacctaggctatatgatagagcctattgctcctaggctgtaaacctgtacagatgttactgtaatgaatattgcaggcaattgtaatacaatggtaagtatttgtgtatctaaacttatctaatgtagaaaagacacagtaaaaatacagtataaaagataaaagatggtatacctgtatagggtgcttcctgtgaatggagcttgtaggactggaagttgctctgagtgagtgagggagtggcgagtgaatgtaaaggcctaggacattactgtacactactgtagactttatacatattgtacacttaggcgacactaaatttttaaaattttctttaaaaattttctttcttcaataataaattaatctcagtttactgtaactttaattcataaacctaaaacattttttgactttggactcttgtaataattcttagattaaaacatgaacacattgtacagctgtacaaaaattttttcttccttgattaatgcattccataaggctttattttaaaattttattatttttatttttaaaacttttttgttaaaaactaaaatacacacatatcagactagacctacacagggtcaggatcatcaatgttgctgtcttccacctccacgtcttatcccactggaagttctttaggggcagtaacactcatggagctgtcatctgtgataacaatgccttctcctagatacctcctgaaggacctgcctgaggctgtttttcagttaactttaaaaaatgaatacgtaggaggagtatactctaaaataatggaaaagggtataggtaaatacgtaaaccagtaacatacttgtttattattcatcaagttatatactgtatataattgtatgtgctatactttttaatgcctggtagtgcagtaggtttattgacagcagcatcaccacaaacgtgagcagtgccttgtgctaagacattatgctggctatgacatcacttggtgataggaatttttcagctccattataatcttatgggaccactgttccacatgtgctctgtcattgacagaaatgccgttaagtaccacatgactatttttcggtggtctgttcctttttattattacagagtattccacagtatggttgtaccacagtttaactgatcacctgttgaagaacttttgggttgttttccagtttttgactattatgaataaagatgctatgaacatttgttcatatctcaaaggttctttatttttttttatttatttttctttttttgagacagtctggttctgtcaccctggctggaatgcagtggcgcgatctcggctcgctgcaagctccgcctcctgggttcacgccattctcctgcctcagcctcccgagtagctgagactacaggcgcccgccactgtgcccggctaattttttgtatttttagtagaggcagcgtttcaccgtgttagccaggatggtctcgatctcctgacctcgtgatccacctgcctcggcctcccaaagtgctgggattacaggcgtgagccactgcgcccggccttcagagattctttaatgggtgaatggttaaacaacctgaaaatataaaagttttcatttctctgggataaatgtccaggagtgtatttttagtttttaaggaattgtcacaaacctgttttccaaagtggctgtagcattctacattcctgtcagcagtgtgtgaatgatctagttatccttgccaccgtttgttgttgcaactgttttttattttagccatttcgataggtgtcgagtggtatctcacttttaatttgcatttctctcatggctaatgatggtgaacgtcttttcatatactaatttgcctctggtgaaatttcttacataattggagtgcttgtttttttctgttgagttttaagagtttaaaaaatacattgtagatatgagtccttggtcagatacgtggtttcaaatatttctttcactttgtagcttgccttttcattctttttaccgtgtctttcacagagtaaatatttaacattttagtgaaatccagtttatcattttttcttttatggattgtgctcttcacctagccctagatcctgaagattttctcctgtggttctttcctaaaattgttacagttttatgttttaagtctgtgatccattttgagttaaattttgtataaggtgtgaggtttaagtcaaggttcattgttttcccaatagattaaattgcagcagatcctttgttgaataggctgtccttcccctgttaaattgcgtttgcccctttgttgaaagtcatgtgggtgtatttgtgtgggtctatttctgggttctctagcctgttatattaattttgaacgaataaagttggcttatgtttaagttttcttggtagtagcgaggcaatggtgccttctgagcccaggatttcacaattttgtgagtaaactgtgttagaaattgtttgttattcttttggtaggttgtctagttcaatttcattgctcattaatcttgcttatagatagcaaattgagaggcatctcaaaaatagtatcttttgttagcttatctcacagagtttggttggagcagatattaaaacaacaaaccaaaaataaattaaatatactagttagcaagtttatattgagggaaaatcaaaccatgtgaattgagctccaatgatgtggctggccttgggtcagattttagtatcatggttcaacaaggtagctattaaaatcttcatactttttcttgaaataattctttagtagtcacataggacagcacacactcatggatttcttctttccttactgtctctttattctcagcctcctgttccttctcatctccctgaccttttaatgttggccttccagaaactttagtctttggacctacctttgcactcattttcttggtcatttcacccaacatacagttttatgttattttattttttttatttttgagatggagtttcactcttgttgcccaggctggagtgcaatggcgtgaactcaccttactgcaacctctgcctcccgggttcaagtgattcttctgctcagcctccccagtagttaggattataggtacgtgccaccatgcctagctaattttgtatttttagtagagatggggtttcaccatattggccaggctggtctcgaactcctgacctcaggtgatccacctgccttggcttgccaaagtgctgagattacagatgtgagccaccacgtccagcctacagttttaaatatcaagtctatactgaggactcccaaatttttatctccatcatagactgatatcagcagtatatgagtgattcagttgtttttgcctctttgccagcatttggtgttgtcactattagttcattttagccatttaatagaatatatgtacatatatatgtgtgtatacacaggcacacatctatataactactcaacatgcctctggtgagatgaccaacaggtatctcaaacttaacctcttcctaattgacttctgcatagcactccagatctgctctttcctcactctcctccatcttgtttaacagcagctccattggccaaaattttggaattttcctcaatcttttctctttttcttacactccactgtttatttaaacagtaaggaaatctcgtgaggtcttcagaatatatgcagaattaaatcacttctctcttgatccctgccattccccaggtacgggccaccatctccttagggcctcctgctttcactcttcccatccctcattctgtttcaacacagcgtccagagtgatactttaaaaatgaagtctgatagatcatgtcttcggctcagaaccatctagtagcatgccatttcattctaaataaaggcaaaagtccttatgatgagttaccgatcctcatgtaatctggccttccattttccctctgatctcattctctactggtctcctcattcaccggatgcagccacaccaccctccttgtttttcttcggacattccaggcatgcttcagtgcctgggctttgcgcctgctgcttcctctccctgaatacgtttcccccacattgtctataggatgttctcccatacttctctcagatctcttggatttaggcctcctgggccaccatatttgaaatatcagattagttccccctcccccatcattcagcattcctcgtaaatctttgctgttttaaaaatagcactatcactgtctaacttactgtgttatattttgttaattttctgtgagttcttcttcactagaatattctttgtagggaggagtttttgattgtttggtttataaaatctggaacaatacctggcttataggaggtgctcaatttataatggggtgaatgaatgaatgaatgatgatgagaaagctgagaatcagtaaagtgactttccaaaacaggtagtgggcagtatagagttgggccataaatagctgcaccatacaacatcctgctagtttctaaagcaaatgatttgaaagaggcataaaacataatttctgccctcaggtagctcatagttcagtaaaggagtttagattcatacctataacagtagaagtaatagcaccaaatgaaatatggtattatgaagtggtacaaataatataaaaagatgaacagtgttagtagtacatgtttagaagggatttctgtggtgaaagtcactaggcacagtgcacctggaggaccgatttccattaatttagaatggtttaaagtaagcttttggaaactaggaagattactttctgtaatcctttcctaggcctttgattctagaaggattgtgttaaaggagttttaaatattttatacagttcttaaacattgttaagcttgaattaaatcttttattatgtctggccatggacgtcattggatcattttcatttcttgggaggattaataaagcacattccttctgttgggcctccagtgcggggagggtgttggccgagcagtggctgagaaaacgtttttcccctggtgttttcaagaaccctctttattagctaagtggtgagacatgccacctggtggttatagtagtatcatttttctcactgttcttggtgcttttcttctcgttctgattccagttatactaggacaactgctataaacctggaatgtttcacactatattatttcagtaatttcaaaaacagcagaaatcactaagctgtttggcacaaagattcctatttggaaggaatcagacaaagtgagtgttgagaaagaacagccaggcagaaagctttgcatcagtcttaaagttctttacatttcaagtaagaggaattgtgaaatccataagacatgtggggtttttctattactttctccccagtatctattacaaagatcagcacatagtaggtactcagtaactatttagaatgagtgcatgaatgaatgaagtatgtgtgatgttatggagtacaaagttagaattagcaacatgacctgaatttagaagcaggtgggatacttatacttttctcagtctgtgggcaccacaccattgaagtatatgtctaagattaatttatatttggttgtttgatttagcaaaacttgctgcctgttaaaaaagaaattaagacctgtcaacttaaagaatacattttgtgagttaagaactaaatgacagtataatttattacccaaagcagtttgcttctgaaaattaaagagttcaagctattaataattatgctgtgactgcaggcataaactgggaatgtcctggcaaatgaggatgtattgtcacctttctcagcctgcctgtgtgttgtttttaagcttcactctagtttatatattttaaatgtcataaaataccacatacttataagagaaaaggttctattcattgctgaagtggaagcttatcattaatttttatttatttatttttttttccagttttggaattcttattactttgaacccaagaaccactgataactagcacaatccagtgaaacagaggaagcagcagcttaatcaaaggaaaaatacatttaagattataagtctggttataagcttaaaaagtgacccagaaagggatatcattgctaaaaaaaaaaatccccttgtgacctgggtacattttgcaaagccacaggtttgcagtgttacacaagggccaaaggaggccatgagttgtctttggttgtggggccggagggtaactgttcatgaaaatagtgagtgtctgaagattaagaaaatcatgctgcagcagaggagaagggagaggaaggcaggaagggaaaggagatgcctgagggtcaaaagctgagcccaagcctaagcccaagctcaagttcaagccccagcatggcacaattttgtgaattaactcaggctgagttgcctccagtctttggaatgtcatcttatactggtactgctgaggcagagggcagtaattggttctttgggataggagaaggggcagttgctgaaatacaaaattaatagtcagcatcccaagttcctcaattgcagccaaaatacatgtgttcaggcctttcggcagtaccgcccccagaactaccagctgtagtgtggtctattcccagacagcaacatgcaagaataagtttacaatacactcagcccttgtggcttaagatcaggggctcagaggctgtgacaactcatgatgctgaaaatgtatccaatgaaaacgaagtactagcttgtttagtagtaacgaagtactattaatttttaatatagtctgatactttattttctaattgtagaagcaacattcttagctatatctttctagaatgttgaggcaaaagagtaaatttatagtgattttcactgttaccagattgctggaatagggaatttctggtagcaagatgggaatttttaagttggaagggtctaacacatcatatagccgtctccatctcattttttttgctgaaaaaactgagcccttgcaaatgtcagttgcaaatctgggagtagtactcatgtctctgaagttgttatatagaattctttttatttattttaataacaatatttatgatagttgaaactttttgagtgcttactatattttatttcatgcattatgttcagcactttacatgttttatctcacttgatattcacaactttatgagattggcactgttattgtagccattttatagatgaggaaactgaagcttagagagttaaataaagagctcaaaatctcacatctagtaagtggcaaaaacaggatttcagctcaagcaatctgattccaaaacagacttttttcactgtgctgccattcttttgcctggtttttctgttaacttcttaaatatatgtcatgtttcatgcttacttcctcattttcataaatatattacctgctcacttatacattatattgcttagaaacaaacccaaccctgttttcttatggactgtatcctgaaaatcactgtttttaatatgtggttaaacaagtgttttattagtgcatttatataaattatttaaccaaaacacttaaccggtgaaagtgctttactgtgtgagaatgtgcatgttctaagaacctctaatttttaaacctcccttattctcagccttatatttgttaaaacctgtgtgttaacacagatgcacccatgttaggggttaattagagaaaccaacctctttatagattagcttgttcatctttaagttgctaggcaggcactgtaaattcagagaacaatctgattgtaagccacaaatcaatgaaattaattttggggttgccttttaaaatagtgtcacaaaatttaaggataaagaatgcaaaaatgatgccaattatctcatcacattagttttgatttaatttttttaatttgaaaaaacctactcttaaacttaattgatttttttaaatataagtttggagataatttttaattcagtaaagttatagtgattgaaaaagtagtttataatttttaataaattgatcttgttttaattttgagtcatattctagaagtgcttctttgcaaattggtaaattgcacatacatttccacttatatacaagataattgctatggttggtttgtataatagatgcagtgcatctgaagagctattttatgagaatattgtttcttgtatctgtcacgagccaaaaagaatatttttaagaaagttatattcttggtgatagaacagctgataatttagaaacaactgtaagacagtccactttttctgattatgaaataataccatagttaagtgtaatttcctataatagaataaaaacacgagttctagttttaggggaggcatgttgttaccgtaccttagaatttctggaagatgacatattcatgcttttcctgataactgctgagtctcctgctctgtctgccaatccagtcaagaagcctttgctagcaatcaattaataatacgtttcatttatacatatttcctatatatagtatgttattgattatctcagtaccactgaagagaggttatctgggtcattggagctttgcttctagatttgtgaagccataaacctatatatttaaaataggaggccaaaaaaaaacgaccattgctttatatagttagattttcagtgaattgagagtttatcatttgtaattatacattaatcaaatataaggcataatatacccccctgcttatatcagcaccatttcaaatgtaatgttaaaaaataataaatggagaagtagatagctaacaagtaggcttaatttaataagacaaagtaaatggcatttggaaacctcatggatttaatgttttatttaaatgatttctgatttttaaaaagtaaatattgtttccagaaggctgagaaacaagttagtagggagattttttctttgcaaaaaaattttacagttgtgtctttaacattgtaccacaaactgttgtcctaccagtctctttgtaagaaagctatagacatgttgggaatgaatgagctctttcctttttaaaatatcagttttacatcattcaggttccaatcgttgcacttactgctactgcaagttcttcaatccgggaagacattgtacgttgcttaaatctgagaaatcctcagatcacctgtactggttttgatcgaccaaacctgtatttagaagttaggcgaaaaacagggaatatccttcaggatctgcagccatttcttgtcaaaacaaggtaaggatttaatggttgatgaattttggtaatgatttcctttttttttttttaacaacttatgtattttatgttatttacgatttccttctaatgcatatttaacatatttcaaattccacctagttttggttcaagtcaagcatgatgttatataatcaattcagtgattgagactagtgtatttttaaaagcagaaaccaattctcctaatattttaataccccattctgttgcttaaacagggcatatactatttatttttattttttaaaattttacttatttatttatagagacagggtctctctgtcgtccaggctggagtgcagtggtgtgatcacaactcactgcagcctcaaactcctgggttcaagcagtcctcctgcctcagtctcccaagtagctggaactacagtcttgcaccaccatgcctggctaggacatatacttttaatgattgataagtaaacaagcaaacataaaatgactctttcatctgaattctgtctagtttactaattacatgacttcagtcttaaggagcttagaaaaggtcaccttacaaacacagtggagcctgtattgtgttccaaggactattgtaggcgctttctatataaaatgatctaatttaatccctataactgctcagtaagttacgtattattttcattttattgttgaggaaactggcattagtacttttttctgtttattttgtttaaaggcattttaaatatatatgttaagaagttttcaaaagcctatattttactttttataagcctttattttactatttgagacagtgtcttgctctgtcacccaggctggagtgcagtggcgcaatcccggctcactacaacttccacctcctgggttcaagctattctcctgcctcagtctcccaagtagctgaaattacaggtgtgcgccaccatgccaggctaatttttgtattttttagtggagacggggtttcaccatggtggccaggctgatctcgaactcctgacctcaagtgatccacctgtgttggccttccaaagtgctggaattacaggtgttggccactgcgcctggccagtttataattttaaacattaaaataaatgcttcttgtccaatcatggtgtctcacacccagaatcccagcactttgggaggcagacgttggagaatcacttgaggccaggagttcgagaccagcctgggcaacatggtgaatccctgtctctacaaaaaatacaaaaattagctgggcatggtggtgcatgcctgtagtcccagctatttgggaggctgaggtgggaggatcatttgagcccaggatgttggggctgcagtgagctgagatcacaccactgtactccaggctggatgacagagcaaggccccgtttcaaaaaaaaaaaaaaagcttctaccaatacaaacacaaaacaagcatagacaaatagagtttaaagaacatcattggtgttttcctctaaagggaatattgatgctaggccaagaaaatcctggagttattcttgaggaccttaaggaataattgaaatgtaggatttgctcctggctttcttgtcctatattcagaataaaacaagaatggatcgaatatattctgagtgttctggccattctagtgctctctgaagtgagtactcactgtgtttcacttccctttcatcctaaagaggaaaagttcttttgaagaaggctgtttgtcctaggttagagtctccacagtcagatcattatctcctcctaatctttgatcctgttcagtctctatggtactttcccttataataacactctctatggcactttcccttataataacactctcctttttaaagcagtttgccttttttgtgtgtaatattgttctcctggttttctgacgtcctggtcctcttataatcctatgcaaatgtttctttctgtttttcatgttgactctgctaattgaggtctttgttactttttagccgagactattataatttccccaacagatacccctctccccagtgccccttgttgctttctatgcagtttacaaattattgtctgcaaacacatccttaagtctggaatacctttctggaactccttactaggaaataaagaccagactcagtgtaacattcaacagtattgaagatctaggtatttaatatgaatttttttttttaaggagatcaagaaagatttttgtacccatttttaatcctccaagaagacttaggatagcaggaaaccattgagagtcagaatgctttctacagatcttaggtgaacagaaactttcctcttcatgagcagtgaggtagagggtaattaaggcttcagagcattgcccgttatttccatcttcttcccttcctttaattctgctaaattcctttaatttgtttatcagtattcaagtatttttatccattgagctaaggtgtttcttaaactaaccctattttgttaaagtcttaattataatatattcatagtacatttaagtgagatagatgagtctctcatataatttagtggttagattagattagaattttctcccctcagaaaattaagaggaaataaaagtctgtagcaaatcacttggcaaaataatggctccttttgtaataggaatttttactcttttgatttatctgttacataagttcaaatttttacatattttccaccttttttaaaaaagagtgatatgtagtcaatatcaatttgagcaacactgttgcatataaattgaaaaggactccaattttctaattccgtacctcagttgtgatcactgttggtattttggcatttatgtagacttcctttctctgaccctactactgtgcagatatatagttgcagttttttgttgttgttaagttgatacagaaatagttgcatactatatccattatttatgcaaattttttttcatttaaagtatctgctatctttccatatattgcattttcttaaattagagccttaatatataggatattacaatatctaggttttgttgagtagttttttcttctttgaaaacatgtttttaaaataaggtttttttttttttttttttgacatggagtcttgctctgtcgcccaggctgtaatgcagtggcgggatcttggctcgttgcagcctctgcctcctgggttccagcgattctcctgcctcagcctcctgggtagctgggattacaggtgcatgccaccatgccctgctaatttttgtatttttagtagagacggggtttcaccttgttggccaggctggtctcgaacttctgagctcaggtaatccgcccgccttggcatcccaaagtgctgggattacaggcgtgagccactgtgctggccttaaaataagatttttatacactaaaagaaaacttacatttttcactccattaagtagttcactgtgaatttttgatattgaagcccatttggttgctgtcaaaaatagatttgaacagattattcagtatgactcttgtagtgaaattattgccttgtttcctctgcttaagttttcagtggcttttgccacagtccttaaaggttttataatttttttaatgtttaatttttaaatgtttgcttaatatttcttagtatgagtgtagataatgatgaacatttagatgactttttactattataatgttgcagtgaatatttgtttacatttatcttttggccaataagcaaatatttttgtaaattagaatcctaaaattgaaattggatcaaaagttatatgcacttgaaattgattaacttttcctaaatctaaaatagtatagtcttttttatattgtcagcataaatgaatgcacttatgtaaatgaatatttttaggcgttaagtaaaatattctgtggaaattgaacatttaagttgtttatacttctatggaaatcgtttacgcttttaataaagaagcacaagtttctacaaaatacattctaacagatgttttctataacattcagtctcaagattactagtaaatacttctttgaactgtaaaagcaatctttcaatattataagaaagctcttgctttagtaaacatttagaaactcagctttattatcataagcaagaataagaacagtgtaacaagttttatgcacactcctttgtaaaccctcaccagactaattgttaatctggtgccttgcattccccaaagtatttgtatctgtcgtttataagtttttatcaaggtttcagctaaaacaaataaatttgtttctggttttagctttaatttgaactgaaacagtcaaaactgagttttggggacttcacacaattcatttggatatttgattctccataatgttttaaattttcatgcacttaaatatatcattatttttgataggctttcttcctttagtcttttctttagaaggtagaaaggaagaattaaataagataaaaccaaacgggtctgaagcatgtataaagtatatatgtttgctcttttgttcttctttttctttagttcccactgggaatttgaaggtccaacaatcatctactgtccttctagaaaaatgacacaacaagttacaggtgaacttaggaaactgaatctatcctgtggaacataccatgcgggcatgagttttagcacaaggaaagacattcatcataggtttgtaagagatgaaattcaggtatgaggatcaatcatcattgctctccgttgctcatagtggaagtggatatttctcaaatgtttatttaccagatctttattgaatactttctttgtgttgaacataaagcagtccctctgataaatgtgggagaacaaacttgcagattagtataaatagcaatctgtacctagtgcttaggtgcacagaggagggaggaatagctctgtcaaggtagttgtgtaatgggggtggtccatccaggaaaattcaattagagtccaaacatgtaagtagaagtttttcaagtatgccaggccagtaggtgatgaggggaaaggaattggttatagaattccaggaagaaggactagcaggtgcaaagacactttgatatgagaacacatactgggttcaggaaatgtgactggtatggaatggttggagggaaagacaatgtggggtaggaatggcacaaagtatggacaaagaggcagggtggaaccgttagagacttgagagaacagttgaatgggtcggttggccaggttatagatggctttaaaacttgcaaagaagcagtctgggcttggtatcatatacctgttagttttcactgactactttagccttagaatttttagtttagatacaattttctgtaataggtaaaacggattaaagtagaataactctggctgaagttaatgtgagggaaaaggaggtacaagagtctcgtctctagaccttgaagacactccctgttggggtcttataatccttggagtgccgcagaatcatttgaaaaccatcttgatgtactactctgtgtttttaaataagataataggattatagaaacattagactggcagcaataagttggattgatttgaagaagagaaactgaagaagggaaagggtatcgatgcagctattgtgaaattctacagttgagattcctgacctgattggactggctcagtgggtgtcatagaggatttatttgggaggatttaagttcaaggcacatgagtaggtttaagtcaacaacttgacactgtcaacatgaaatccacactgtaactataagtccgaggaagagccctctcctgaagttaggaatttaacttcagctcttgcattttctgtcccaccggtcatccatttcttctctatccatctccttttctgatatctagttgttatcagtgttgttgaaaagcttaagtatgattcatattcactgtctataaagttcactacacatagtcatgctgtaatgcatacccgcctgaaagcatctggtctctcttttccttctttccaaagataagaataccattcacagctgtttagaatagaaattttatccaaattcttcagtgtttatatttttgttctgttatttcagtgtcttgaatattgtcaaatgacatttattagctactactggtactactgaatcttaataatcaatcttcaagccattaactgaccaatggtttcttctatcttaatgtattagtaattattcatttagagtaaaacatctcccagaacatgaaagaatacaaactttattcatgttacgttgtgacaggagactttgttggatgcgcctgattttcctgccaattcacagcttcattaaaacagtaatgctttgaaatatggcttaggaaacttcacaatgatcattaattacacctaatttctggaagagtatatgcatgtatgtgttgcggtattctcccttgctgtggcaggatgtcacaaatttttatccacattacgaaaatttaaaaattgatatggttttttctccctacgttgatatcagatattttgttttatctgacagctggcccaatgtactcctactttgccattataaagaattcaaaagcttcatatttgcattgaaagttctcaaacactttgtaaagatgatgaaagtatgtttcatcatctatgtagaatagtcaggtgttcttgcaattgattacttgctaccgagaattgaatacctactgagtgcataatgtatagaattctagatattcacttttgtgtgtttttacagttgttatataccttagtgtggctctaaaagtggaggtgacagctgtagctcttaatgtcttacactgagtgatgtttagaatcttaaattttcttttataattttagaaaaaagtatacttttctttcttatttttataaccagatccaaacacatttgcatgtagataggcatttttagtcttgaacattcatttttacttttaatcctcacttttattagtttcgtatctttttgtatttcatttcccctttcaagatgccttgagtcctttctttttaggaatgatgttgtgaataaattatttgataaaatgtctttacacctgagagtttataaggatagtttgaaaatcatgtctgtaaaataggttgatctcacctaaaaataataccatataattaaaattagaattattattgtgttgcttattgactcttacatatatcaaaaaattgctgagtcttattcagccagagcttttacttagtatgatattcattcctatatttacttttttctcacctttctcatactttcttttacttactcagcattttcctcctttcctccctcctttcttttcttctttccttcttttctcttcctttcgtattcctggtccatcttagcatgtaatctttctttatgaaatggcatgcagataggtctactgttcttacagtaaaaaacttcaaggcctcatgtctttcccacttctgtttcccattcacaacctttttagctgattcttttggtactttaccactatatcttgccatagtttatgtacctggctcctacttaattttttgtttatttgtgtattagtcgtaggcattatttatcgactcttctctctgaaagatgaaaggttagctctctttcacattcttaactgcccttttttcttaccttgtccatgtatttctaaccccctttcctcctaatatgtttatgtcataattttggctagattagtgtatacgatttacataattattactctgtaaatgctttttatgatctctgagccatgtagtatattatggctatttttctttcttatctatttgtatttttattgttattacctaaaaaaaaattttctatgtcttatcactaattcttccctaaaatttcccacaattgtgtaaacttacctcagtatattcatagatatgagacattctatcaattttaccctcttaaagatgcagagataatgcattatgtttcatcccaccatctttaatgagaagcttccatcttagattaatattagagaatgttaaaatactctgcaatcaggtaaggacgcttgaaacttcattataatgcaaaagttttctttaacacaataaatattttgaaccccttttgtgtcttgtattcataggagttcagatagaccactttatttactattttttatagagagtgaacagaaatcccatttctagtcaccagtccttaatctgtaaatcaggcagataatctgtaaatgattggttgaaatcacattgaattccactttgtgccagggacttaagttaacgaacaaattattcttacaaaaaggtataaatgtaaggttttcattctgctaaatatgtttgtcaaactgtgttgtgatttgttctcagtgtgtcatagctaccatagcttttggaatgggcattaataaagctgacattcgccaagtcattcattacggtgctcctaaggacatggaatcatattatcaggagattggtagagctggtcgtgatggacttcaaagttcttgtcacgtcctctgggctcctgcagacattaacttaaataggtaaaaaaaatttattgtttttactcttgcagatttctttctttctttccatataaacctcaaaagtgtttgaggctatttccagtatcccaagtaatttgtgagtgcatttaaagtaaaaaaaaaaaaaaagaaaaataaaacctccccaaatccagaggacatgtaagaagaacatttgtggtaagagttgccacttggagatgagctaatttcagcatgccttagttagtgtgaggaattaactaaatcaggacaatacttgggcctgtcacagagatcctatggaatactttcctaccattgtgcattaatgaacaggttcttttcctctcctcagatcctgtcaagttgcgatgtcttcagccatagttacttcaactaccactgattttgttactgattctttcttcccatgctacagtggtgattattccagaggatttctctcagtccctatttgactcttgttactatttgttttcttggttagttccatgagaccatgccagttctccttgactgtgtatgaatcattgtgttgcactgtactgacagactgccgtaagtcaatattaagtgttcagtatctaagtgcaggagaacctttctacttaagtactcaacaagtagtttgttggcacttaagttctatgagattttttgttgtaaaggaaaacattatcttgcaaagattttggggcagcatttaccaatactttgttccttcatccgtaggaaaaagaatctcaggagaaaaacctatacatggtaaccaatggggctgccaagctgatgaagtattttcagagtacacctttgtgtagctgaataaattgagatcttgaatggacatattagctcattttagtaaaatgataagagagtgcctcccactacagtttttgtttttatgcatcattaaacaatgtgtttttgattgtccactgtgttccatgaactatgctatgtgtgggagatatagtagtaaagaaaagcaaagtacctgcttccatagaattcagtataatgggaatggtaattctttagagaatcacataactatggatacataggcttcattttactgttctccttttgtgtttgaaaatgtcaacaatcaaaattttgtaaaaaaggaatcatgcaacatatttaaaattataactgtgttaagtgtaatgaagggaaattgcactgagtagtaagaatatataatggtgtgtggtatttcccaagttaaaaaggtcagataaggcttccttgtggaagtgatagttcaaatctgaaagaagaataggaattaattaggtaaaaatgtttgatgcaaattttaagattttccttctgagtagtcagtagcttttccttcttaacatagaagatgacaaaaccatcctttttttgtacataacaattcttgttttcctttagacagttgtatctgtcaagcttcttatgatctaatttaaataattgggatagaacacagctgtacatgttactattaaatatggaatatatcaaacataagttgattcctaccagttctgattttatttgtgtattttgttaaaggtactgaggacattaatatccagttttatattgtgcatttgaaggttcatcaataaatacaattcttgtttctctgggtcttaaaagatattttaaatggttatctcattaagatttaacaggaaataacagtgattcaaatcaaatagtggtgccagaaacccatacttgaattttgggtatagacaggttaccctttgcatcaatcctgaggaaactaaaactataggattaatcaggataaaaaagaattgagcaaggattcaggagggatctgtatcatcctggtgacaaccctcttctagaaaaaactagaaagtctaagaataaatgaagttgctggttctcacctggaaaggtcagttactcacaaaatttttagagtctatcttatgccataattctatcactgagagaagaaacttgtccagtcatcatgtaatcttcatgtaaatttatgtttttaattgcagaattcataccacaggcaaagtcccaatgtctgcatttgctgttaccttaaatagtcaaaccccaaagttattgtaatctttttttaacagagaataatttgcagagtaatctcggtccggtagatctttcagtggatccaaatgattgccatgaatggtttagaatttttttaattttcaagttgtttttattctgtggaatactggacttatttttgtagtcccaaaagaaaaataaatatttatttatttgccgttaagagttgtagttttgttttctcaaatttgtcctgacactgacgagattagttaaatgtaggtcatctgaaccaaatacaaggaaggaaggacccagttctgaagagtgtgggcatttcttttcttgtttttttttttttttttttttttttctataggaggggaacgaggtgaactaaacaaacaaaataaagcaaaaaagaactgatttttatcccttgaggtagaaagaatgagattacagtggacccccttgtctgcattttcactttctatgttttagttactcacaaccacgtccaaaatgttaaatagaaaattccagaaataaacaatttataaattttaaatcagtggtggctttgagtactgtaatgaaattttgtgccatcccactcagtctgcctcgacttcccttagaatcatccctttgtccggtgcattcacgttgtatttactccctgtctgttagtcacttgttgcagtatcacagtgcttgtgttcaagtaacgcttattttacttaagaatgaccccaaagcacaagagtactgtgcctaatttataaattaaactttttcataggtatatacatataggaaaaaacataatacatacaggatttggttggtactattctgcggcttcaggcatccactggacgtcttggaatgtatcccttgtggataaggaggaactgtatatggttaacctaggagctagagtcaacagttggaagagactttggggataattacatggaagggcatggtgggtggtcgtttcagatgacaagaatgtttttgaataacggatcatttgtgtcttcagactttccagaactccttgagaattatgcagaggtatttaatcagtcagaaggttgaatagtcaaattattagtgagtgaagtctattttgatgaggattttactaatgctgtcccttagatattataagtaaatcgttgttttcttttgaaatatctgaaacctagttaacatggactttcatttgttcttgtaaagatatgcaaagctatttgggagattgtcatcatctgatatttgatattcatgggctttcttcacagaagactagaaattaacagagtcatgatgaattatggctgcattgactttaaaaaacaaacacctccttaatgttatttaacaattttgaataaatttgatatggcaaacaaatcagttataatcgattgagaaaggaacttaattctaatacttgactggtgtcccataataacccataatactaagagacagttttggagggcgagaagtcctgaagagctgatagagataaaggttcaaatttgagcttctttcagtgttccttacgtcaatgcttttagtttctcatacaaaataaaataaagaataacctttttactgggaaaaggtaaaaattaataaattgtagaagcattgtttgaagccaaaaagtgtgtgacatgtaaattgaaatgaaaaaccttagagtttttgatactttttcaaagcagctaaagaattgatacttggacacaggaagaattttttttcaaaagcaatttttataaaatcagaaaaatgtttacctcttgttgggggcattgactggaaaggaatacaacagaactttctgagatgctagaaatgtttttttatcttgatggggtgtgggttttgtagataatgaaaaataaacagtaaaaaataagtaaaaaaaaaagtaagaaagttgccaatacagttttacatattcctgtgatgtttttaatcgacaggcaccttcttactgagatacgtaatgagaagtttcgattatacaaattaaagatgatggcaaagatggaaaaatatcttcattctagcagatgtaggagacagtatgtattatttattttatgccaatagtatggatttatggatgatgctcttttaagacaacaatttggctaaataattatcagtattttgaaaaaatattttgttgctgttacatgtgtgctgaatttttaaggctaacttctttgtgtctgagtaaactgaagtcaaataatgaagtcccaagtgaatcaattaatggtgattttacctcattattttcaggaatgaacttaacatatacgtttctgttcttttatttaatttaaaattttgtcttgggtagaatcatcttgtctcattttgaggacaaacaagtacaaaaagcctccttgggaattatgggaactgaaaaatgctgtgataattgcaggtccaggtaaagatttcttattatagatggacattctaaaagtctttctttctcttccttttcatgtttaactgaatttttgttgaatgataagtatttcagttttttaaacaaaacaatgaatgtgtttagatatgagaaagcaaacaatattaaagtattttgcttaaaaaatagataaagcaataaaatggtagccctaaatctaaacatatcaatagttatgttaaatgtaaatgatctaaaatattatttaaaggcgtaaattgtaagaattggtttaaaaacatgaccctgttctgtacgttgtccacaagaaatccactgtaattatatagataggtttaaaaaagaatgaaacattacattccatgaaaacattaatcaaaaggaagttggagttactttaatatcagacaatggacactttggagcaaagaatattatcaggataaagaaggatattatatgatgtaaaagaatcatttcaccaatgtatcagtcagggttcaccagagaaataggacgattgatattatggagatatatatatatatatatatatatatatatatggggagggaaaggaagaacaaatatggggagagagggatgaggcgactgattttgaagaattagctcacgaaattgtgggggttggcaagtctgaaatttgtagagcaggtcaataggctggaaactcaggcaagaggtgatgttgcagtcttgaggcagaatttcttctctagcaaacctagtttttgccctttagtcctgccactgagtggatgaggcccacccacattattgacaataatctcctttacttaaagtcaactgattataaatgttaatcacgtctacaaaatattttacagcaacatctagattagtgtttgaccaaacaactgagcatcataggctagccaagttgatgcataatattaatcatcacaaccaagaagacatcatcctaaatatatatatatatatatatatatatatctacttaacaaaaagactgacagaactgaaaggagaaatagagaaatctacagttacatttggtgacttccagcatctctcaataatcaataaaactgacagaccaaaaaatcagtaagaagacagaagaaatgaacaggattatcagcatgctggatctcattgacctttttagaacattctacccaacaacagtagagtacacattcaagtgcagatgcagtattcatgaacatggatcatattcagagtcataaaacaaaccttaacaaatttaagaatcttgtatttgtatattttttgactagaatggaattaaactagaaaacaataacagaaagataacagaaaagtctctaaaccttagaaattaaataacacacttataaataaatccatgagtcaaagaggaagtctcaaggcaaatcagaaaatgttttgaactgaatgaaatgaaaatacaaaatgtgtgagatgcagctaatgcaatactgagaaggaaatttatagcattaaatacctatgtaataaaagaagaaaggtctcaaatcagtacctaagcttacatcttaagcaacaagcaaataagagcaaaataaatcaaaatgaagtaaacataaggaaataacaaagaacataagtcaatgaatagaaaagctatggtcataccactgctgtccagcctgggtgacagagtgagaccctatgtcaaaaaaatttaaaaacaaagcagcatgcagcattcattgtcagtgaatagaaaatgggaaaacaatagagaaaatcaactcaaaagctcattctgtataaagatcaacaaaattgatataaacttctaacaagactgacggaaagagaaaagacacagaagaccaataccaggaatgaaagagggaatttcactacagacctcccaggtattactagggatgataagggaacactatgaacaactcagaacataactttaataatttagatgaaatggatcaatttcttgataatctcaagctaattaaacttacagtgaattagataacctgcatagtgttacaaccattagagggattgaattctatgttaaaaatctctgaaaataaaatcccctagcccaaagaatttcaatgacaaattctaccaaacatttagaagacaaaataataccaattctatagcatgattccatttatataatagtctttgaaacataaaactatactagagggatgaagaaaagatcagtggttattagagattgggggagggagaaggtatgattccaaaggatagtacaaggcagtattttggagtgatagatttatcgtgccctgattgtgatgggagttagatgaatctatggatatcttaaaatgtgtagaactttacacatacatacaaccaatttgcctatgttaattgaaaaaataaaataaaaacaaattatttacctggtgggttagctacgtacctaagttcaatagctgcgttactgtaagacaaaagaagcattattagggatggagttgttctctgtgtaatgacaaatacttcttcactaagaagacagaattgttttatgcacctttaaaaaaaaacaaaaacaaaaaaaatacaaccaacaaacagtaacttgctggtgcggtggctcacacttgtagtattagcactttgggaggctgaggtgggaggatcacttgagaccaggatttttaagaccagtctgggcaaaaaaccgagactgtgtctctacaaaaataaaaaataaataaaaaaaattagctaggcatagcattatgtgcctctagtcccagctactctggaggctaaggtggaaagatcgcttgagcctggaaggttgagactgcagttgcagtgagccatgatggcaccactacactccaggctgggcatcagagtaagactctgtctcacataaaaaaaataataataatgataaaaactagtctgggcatggtggctcacacctgtagtcccagtcctttggaaggccgaggcaagagaattgcttgaacccaagactttgagaacagcctgggcaacatagcaagaccccatctctatttaaaaaaaaaaacaaacttaaaaatccagcaaatacataaagcacaaagccgacagaagaggtggagaaatcaacaaatccaccatcaaagtgggagaatttgatataattttaagttattggtagggtaaacaatccaaaaattagtacactgtagaaaatttggtcaacatagtaataagtttgcttattactatttatcagtatacatagtatactgatttatcagatacatagtatatggagccctagagcaagcaactatagcagtgtatctcaagtatttttacttcatgacccacatagcaaatgatatgtgtatataacacactgggctaattgtcagagttcagtttctgtccaaaaccctaagatctggagtgattaacctttcagcactcttagaactcacttgtttgtagcacactgattgagaagcactgaaagacttcactcctcaaacatacatggaatatttctaaaaactatgtattgggccgggtgcagtggctcatgcctgtaatcccagcactttgggaggccgaggcgggtggatcccgaggtcaggagatcgagaccatcctggctaacatgatgaaacgccgtctctactaaaaatacaaaaaattagccggatgtggtggcgagtgcctgtagtcccagctactcgggaggctgaggcaggagaatggtgtgaacccaggaggcggagcttgcagtgagccgagatcgcgccactgcactccagcctgggcaacagagcgagactctgtctcaaaaaaaaccaaccaactgaacaaacaaaaaaactaaaaaacaaaaacaaaaaaactatgtattagagcatgggttggcaaactatggcctgtaggccaaatctgcatgctgttttatttttttttatttttttgacatagggtcactacaggctgtcacacaggctggagagcagtggtatgatcatagctcactgtaacctcaaattcctgggctcaagcaattctcttgcctcacctcagcttcccaagtagctacaggcatgcactaccagacccagttaattaaaacaaatttttttttggtagagacagtctcagtatgttgcccaggctggttttcaaactccttgcctcaatcagtcctcctacttcagcctcctaaagtgctgggattataggcatgagccatcacgcttgactaatgtttttgtaaataaagttttctcagaacacagccatgccttttgtttatgtgttatgtagggctgcctgagttaagtagttggctgcaaagcctatcatggcctataaagcctgaaatacttactatctggtcctttatagaaagtgttttctgaccctgtactagactagcttgtctcaaaattcttcaatgaatttggaagttttctcaccacattttctgaccataatgcacttgagttagaagtaaataagcagataaacaacaaaatcctcatgcatttggaaattaaaaataacacttaaataattcatattcaaagaaaaaatcaaactggaaattaaaaaaaattttaaacctacagataactacattaatatgcattaacatttttagaacttagggatagttacaatgatatacattaaaactggtaagaggctgggtgcgttggctcacgcctgtaatcccagcactttgggaggccgaggctgggggatcacgaggtcaagagattgaaaccatcctggccaacatggtgaaaccccgtctctactaaaaatacaaaaatcagctgggcgtggtggcacgcgcctgtagtcccagctacttgggaggctgaggcaggagaatcgcttgaacctgggaggcggaggttgccgtgagccgagattgggccactgcactccagcctggcgacagagcgacactcttgtctcaaaaaaaaaacaaaacaaaacaaaaaaaaaaactagtaagagggcccagtggctcacacctgtcattctagctctttgggagactgaggagagaggatcagttgaggccaggattcaagaccagtctgggcaacataacgagaccgcatctctacaaaattttaataacaacaacaaaaaaaactggtaagaggcaacattgaatagtactttgtgggagtttattagcttgaaatactcataatagaaaagaaaattaatcagctaagcatctcactaaagagattaggagaataaacctaagcatagtttttttcccccaaacattattatatctggaatattgaatgcattcttattgctatttcaaagatacttactctaaggaaagcaattgaattaggtagttgaactctatagtagattttctttaatgagtccttttgttctcaacctacttaaataattctcatttgaatttatgatagtttcagatctacccaaagggtgacttaggaatttaacttctaaatctatttaaatgaaaggtttataatctttttgtcatattttacagtcgttagcgtttaacaatttatagcataggatttgggtttttttttttttttcattttaaagaagaagtttatttaagcaagacacttgactaagggaagactatcttggagttattattactagagtaatttatttctacttaaagacagattgccccacaagtaacagctacataaaaacagttgtaaaattgtccttggttttacaatgataaatgaaaaacattaaaattctctaattgaacaaggtatgcaaggatttttatattgttttttgctaaaactatgacagcaaaataacatcctggagtataaagataagagctgaatgagcaggccactaggggacaaagggagtcttttcacagaaccaatgcttcttttgcccaccccatctccatcgaagtcaatctaaacatattattggccatttagttaaaaaaagaaagaaaagaaaagcaatatgcttgtggacatacaccagttactttatgtgcagtaaaagagtaggaaggggaaggtgaaagaatagagaaaactatgtagtcaggatgtggtggaaccaaattgcaactttctttttttttgagacagagttttgctcttgtcacccaggctggagtgtagtggtggcccaatcttggctcactgcaacctccgcctctcagattcaagccattctcctgcctcagccttctgagtagctgggattacaggtgcatgccaccatgcctggctaatttttgtatttttagtagagatgggttttcaccatgttggccaggctggtcttgaatgcctgacttcaagtgatccacccgcctcagcctcccaaagtgctgggattacaggcgtgagccactgcgcctggccaaattgtagctttctaattgagactgtcttcttggtctggaagagcagagttctgcagtaaaataacaggtcccccttttagtagacatctccatgtctgctgctggaacacatcagttttgtcttaagcctcacttccaaatgtgcagatgtgtctggttcattgattggctgcctgtcaaattgaaacctgatctgcctcattggcaaaccgtgccccttacaataggctttcattggtttactaagcggtgtggtgcgtggctgttcatcttaaactgcaccacagtttaagatgaaccttcaaatgaacattatccttgttctcagtcttgactttccttgggctttttgtggaccctggtgagtgtggcagtctcctcagctgctgcttcacaaaagaggtaccaggtctgccccgaatgagtgagcccctaaacaggaccaggagtggcagaagaaagaggcagcaactgagatgtgttttttctaagctgaaaggctttttttttttttttttttgcaacacacctttaacactaaagtccaatatttatataattggtcaagtaagtggagctgttctagctataaatatggcaactctgcttgctcgtcctattattgacattattcctttctgtggtctgaggtgcctcccatgaaacttgcttctaggacactaggattgagaaccatcagcgtaacatatctgttacgctacaatagtttattttcatattttagctactttacatactcgggtataatgaactttattcatagcttctgaagcagttggcacatttgagatattttttacttggctaattgttatgctaaatcttttgatttctaaagatacatgcctttgctaagctttcttcaaatgttattatttttatttagattggatcattgctattccatggatgactcagaggatacatcctgggactttggtccacaagcatttaagcttttgtctgctgtggacatcttaggcgaaaaatttggaattgggcttccaattttatttctccgaggatctgtaagtatatatctgtgaattcccttcatagatcttcttttacttctattacacttttcttcagaggtttgcagtattatgattgtagctttgacttcagatgggtgactaggaactcatagagtcttactaagttccagttaaacactacattcattactttggataaaacccgtgtgtatggcatcttctgctgttttcatgttcaagccgatgttcagctctgcagctcagtctggaagcattgtgttaatttatcacattgcatttgggtgaatccctagactagtcttgcttaggataattaggaaaagttaactttcattgtatcaagggacaggtagaacaaaattgtccttttgtccaggaaaccattaaattcttcaaggaaaactttagttatagggattattttttaaatgtctaatttcagtaacaatatttgggacatatttatttttccttctgtttcctatcagaagtatttaaagttataagaaaattgtggtttttgcctttactaatgaataaataatcaattaaattcagttacttttttttggagtgattgatgttccagtattcttctaaacaaccacgggtacaaatgtgaataagataggaccgttgcagtccaagagcttgttctgtagtcctttcctttatatgattttttcccctgatttagaagtctataaagcaaagctaagtattacacactgataatggctgaataaatcaagagcaagagataggatactttgcaaatatgcatatttattaaaaatgtactttaaaatagagattaaaattctcgtattgaatgtagaataggtaagcatttatttgtgaaatactcgaatgcttcatgtaaatactttctgagtttgtatttttagaaaggaacattttggaggctgaggcaggagaatggcgtgaacgtgggaggcggagcttgcagtgagctgagattgtgccactgcactccagcctgcgcgacagagcaagattctgtctcaataaaaaaaaaaaaagaaacatatttattaaattagttgtgaaatatttttaatgaaatatattgaaaacttctgttgatttttcatgtactgatgtttttagattctaaatggagtttaaaattttgtttgtaaatcacaagttggattagaaatttaatagtagaagtgttgcctaaggactattttaggtgctgtgagtgaaactgtattttttataacaagaattttagttgtaagggacagcttaaatataattgagatctgtgaaaatgtattctgtctctatcaccttcagaacctgtgtatctcagttgaatgtataatttataaaaattattcttgttttaatttggtgtaatccagccatatccagtatcaacaaataagtctaagtaggctccttgacaaacttgaactggccacaagagagatcagatttcacctattaaaaaaccaaatcagaccacttacactgacagtctcttctgggagtcctcaaattaagaagtctatcctttgtgaaatattacactacccttgctagataaaacttttctaaaagtaccacttaatgaaaatctgtagacactaaatgcaatgaaaataaggcattgtttttttttctccccatttcagtgatcttggtatcctgggatattgtttttaaaattatcgttataattcctttgagaatttagtgaaatgttccctttaaccaacttaggaaaaattaatatctttgtacatgattttgagctgtaaaataaacattttaaactgggaataattggagtttagttaaagagataatgtatataaatatataacatagtagcagcatataattctgtcttacacaagatttttctgaatagtataaacagttatgtagcctatctaggagtttgtgaatagagtttaaaattttgttttgaagctgcaaatttgattagaaattaaacagtgaagttattacttaaggaacttcgttttagctgtctgaacaacttactgtataaaaatctttaaacattctgtataaatatgtgataagatatgcaatgaccttaattttatagattagaaaataaaaacacactcattaatttacataactgacagattaagtgaaacttctcttctgatcacgttagcagaatgccaaatcttgtcgtggcactagaattagacggtagttttgataatacatgatttgactatagacatttgttgaaactattggtagttttaatcactcttgtaattttcaaactatctaacgggagaggattatccatcctgttttctagacaaactgtttcatctgaatgaaatatattcctagagataattatcactacttcatcttttggttttattttgcacatagaattatagttcacaatgactttctgaagctctaaagttgcagctgtgagcttctttggcctgtagggactgggaaaaagcacccccgtcctcccccaagcccccccaccaaaaaaagttaaagtgtttttaacaatagctgtgggctttttgtagtttcagaacttaggagttgcccaggctggaatgcagtggtgtgatcatagcttgatgcagccttgaactcctgggttcaagcaatcctcccacctcagcctccagagtagctgggaccacaggtgccaccccacccagctattttttttattttttaatttttttgtaggtatggggtctccccatgttgccctgcctgtctcaaactccagggctctcaggtgatacccaccacccttggcctcccaaagcaccgagagtcactgtgccaggctgagtttaaaatttcttgagttggagtttatggctattttttccactagttattaaacatgtatttttgtataaggcactgtattacattttgtggggggattcaaagctaaattagatgagacgcatcatctattatggaagatgttacttaagaagaaatgagtgtaatgtagcagagaattagataagggacgtatgaatacatataaatgctgttgaagttctgaagagagagagtgtttagagaaattagaggagtctttgtgaaggtatcactagaacttcctatttttgtggaatatatagtagattttggtgtgatactgtggatttggacattcactcagagaaggaatgagggaagaatggtggagaagaatggcattcacagtacaaaaagcaactgtgacttttaaagaagttaatatggagaagtggcaagtcttttcttctctcttctcttctcttctctcttctttttcttttttctttttttctctgtcagataccgttgtaaagactttgcttttaccggaaactgatacgttgggtcatgtaccctggccagtcagttctctttattctaacacttagccgatcagttagatttccacattccatgatatgtcagttttggtgacccttatttttccacctggtttataaagggaaagaatgtgatatgtcacccaggctctggagtacagtggcatgatcataggtcacagcagcctcaaagtttccagttcaagcgatcctacttccttggcttcctgagtatgtggcactacaggtgcatgccaccatgcccagctaacttttttgtagagacagggtctccctatgtttcccaggctggtcttgaacccctgacctcaagtgatccgcccaccttggcttcccaagatattggcattacaggcatgagccactgtgccggcctgaaaatttctcttttgagatggcatcccacagaagtatacctgcttagagctaacactggtaaaaagactatttaaccctattgccttattttactgtagttgagattgagttaaactgaaagctgaatgacctgtcctaggtcatactgttactttgtgccagagtcaggatgagcaaatggatttcctgcctgctagtctagtgtcttttctatttattgtgctgtaacatacagttttaaatttgtatttttatgcccaatggacatggtagctcacacctgtaatttcagcacttttgggaagccgaggtggggggattgctcgagaccaggagttcaagatgagcctgggcaacatagcgagactccgtctctataaaaaaaaatttaaaaattagctgagtggtgatgtgtgtgcgtgtagtcctccttgtgggaggttgaggtgggaggatcgattgaatctaggaattcaggactgcagtgagccatgattacaccactgcactccagcctgggtgacagagcaataccctgtctcgaatgaatgaatgaatgaatgaatgaatgaatgaatgcccaaatccgtaagctatgttctgtatagcagctttttcatcataggcagtttttactcttatcagtggacaacctacaaaattaactaaacacttaaacaattaacagaggaggccttgttcagagtgagaaatcattaagcatttgttgttgaaatttcttactgtactctgttttaattctgtttttttttttttttaatgttacttgttttagtttggattcctagttgaaaagggaatatgattcctttaaaacaaagatactctgctttaaagcaaaggtatatcatcctcttcatggtgattgccatggaaacaagacaatgtaaatttattcaaatagtacacagtttttatagttattgatcatgaggggaagggacagttaatccctactgatcagataaaacctcattgtttcatactaataaatggtttttttatgcttatgaaaggaaaagccagaagtgtaatttttagtgtttagagagctagtgattctagttagggaacttaatacctttgaagttattagtttgcaagcaatagaatctactactaccaaggtgacccctagcagatgtagagtaccattaacaagtgttccagggaaggaaagccaactagataccaagtcatgctttttactcttagattaagaaattcaggttgagttaaaggatcagctgttaactaataaaaagcagattaatattacagagccaggctctgtcctggttatggacttaatcttcacagcatcctcaagagataaaaatgaatatacctgcatattagatgaggaaatagaagataagtaacttgccagagctatgacgtgaactcaggtaatgtagcttaagagcccccacatgtatgtatattgggtgtgtgtgtggagggggtgcgtgtgagtgcttgtgcatgcgtgtggtataataagaaaaaattagcatttatgcctgtaatcccagcactttgggagaccgaggcacgaggatctctcaaccccaggagttcaagaccagtctaggcaacatagcgagaccctacctctacaaaaaaagttttaaaaatattagcgggcatggtggaatacacctgtagtctcagctgcttgggacgctgaggtgggaggatccttgagtccaggagattgaggctacagtgagctatgatgacacctctgcactccagcttgggtgacaaagagagaccctgtctccaaaaaaaaaaattagaactagttatctggaggcctgtgttctagtcctagctttagtacggctacacagtgacacattaggctaccatttaacatctttgaacctctgataatttgttaacaatatgggtaaaaatgactaagataaatcaaagagctccagcattccctccagctctgaaattctatgatgttttatcttattttacttacaaaaataaattatattatgtatatttaaagtatacaatttgatgttatgggttacctatagtaaaatgattactataatgaaactaattaacatatccatcatcttatattgttaaccatttttttgtttttgtggcaaaagcagctgaaatccactcatttagcaggaatcccaaatacagttcagttgtattaattgtaattctcatgttgtacattcgatctctagacttgtttatgctacatatgtttgacttttaaacattctactcaaatcaaccctaagtcagggttagcacagacaggacttgttaacaaggtagaaggtgccacattgtacctgggtgtttatatttctctaaatcttgttctgatcatattttaataaatataatcatcaggacaccaaaattcattccttagctattaaaaaattctattctattttattgttaagatttaggagagcatggtacagattctcttaactatacctatcagaagcctatgttttaagtccaatgtataggcactgctctgtttgtctctggtgggaacttaccctgctttacctaatttcatcctagcttcctttttgtgaaagatcacccttgcttagcctattttttggcaaatctacaccttggaaatagtagtaaatgacataagcatattaatatttatgatgtgatttatttttgttttcaagtcatatactggggaagattctcaaatattaaaacaatgtatctttacatttatgtatgtcgttcttgttctgttttagaaggcttgtatttgcatttttaacattccaaaaggtaaacctgtaatcataatgttttcatcaattcaataaaaccattacgtttgtaatagagagccctatagttgccttagttaagtttgctgcaactcattttatatattcttttaattttgatccctggatttttaattgattattaaaccttcattaggatatatatgaaatgtaaaaatattgagttataatctaccgttttctaaaattttatactgcatttttatatagaaattcaaattgctcataatcattctagtgaatttaagtagaaaggtatttattactaggtattaaatggcttataatattgttgacaaggttccactgcaaaatagttcaccaagggagctgtggcctcttctgtgatcaagaagccatctgtcaacttgggaagcttccactatagcacctaaccccagactacattgagtaggaagctgtaataatcaggaagcttctacctttgcatgctctgcaaaccaacgtgaacctgctgtaatttgtaaccacaaaatggatgcctgttgatacttacgaagctcatcattgtatgctgggttctttgctaatactttcttataaaaattaaatacctccacaatcatgcatgctagcagaaacagcagaggagtagccttagcctcacttcctgcttatacctgtcatgcaaatatacagaacccagaaccctagctgaaagggagtttgagaactagtatttgtattgtcccagattctgcagtggaagaattcatagtggatggaagttagaatgacccttgaattacaatcggccacattcatcacaaatacattaaataagagtaatttgccataaagctctatgtttgtatacttctttgttttttttttttttttttttttttttttttgagacagggtctcactctgttgctcagtctgtagtgcagtggtgtcatcatagctcactgcagtcttgatctcctgagctcaaacgattctcctgcctcagctcctgcttcagcctcctgagtagcggaacaacaggtacacaccaccacactttgctaattttttattttttattttttgtagagatgtgggtctcactgtgttgcccaggatggtctcgaactcctgggcttaagtgatcctcccaaagtgttgggattacaggcatgaaccactgtgcctggcccatatactacatatatttaaaagtagtatttaaatgtgtaggatgaatgaaagaggcagtaagagaacaaagtgaatgaaaaagtatttctatatgaagtgaaagcaggagagtcctctctgttagagaacaacagaattgcatatgacagactagctttcttaatatttctagaacttgatggctgtgaagagcgtcccgtaggaattctcccttcacttaggaaaacatacctcaaaaccatcagctgtttagcatgcacctgcttttcctggtatatctcagtgaagcagctaaattgtaaatgattaagtaaactttgcagtgtatcatgtgcaaaagcacagtaaaaacaaaaatgcattggaagctgtgagttgttgcactgcactcatggatgaatagctgttggttcgcattgcgtttttttgttttgttttgttttgtttttttgagatggagtcttgctctgttgcccaggctggagtgcagtggcgtgatctcggctcactgcaagctctgcctcccagattcacgccatcctcctgcctcagcctcccgagcagctgggaccacaggtgcccgccacaacacctggctaattttttgtatttttagtagagacggggtttcaccatgttagccatgatggtctcaatctcctgacctcgtgatctgcctgccttggcctcccaaagtgctaggattacaggcatgccgcattgcgttttatataattctcatggttctagtctcgagctgtaggattttgatcactgtttcaaacaataatgtgagtttgctaagaggtctaaataacaaaagctaagtgttccaaacacatatccaaacctatacactgggcaatgcatctgaattatatgtgaaatttcctgccattatttaagacacaaaaggaacattattttgataatgtatttatttgtgagtggagtgttcagaatgagcacgatgggtataacatttttgtaggtttttaaagttgaaatttagtgtaaatccaaagaatcaatagacaagtctgtgttttacttaacctatatgtttaaattagcatttttagatactgattttattcctaatttcagaattctcagcgtcttgccgatcaatatcgcaggcacagtttatttggcactggcaaggatcaaacagagagttggtggaaggctttttcccgtcagctgatcactgagggattcttggtagaagtttctcggtataacaaatttatgaagatttgcgcccttacgaaaaaggtaaacggtgtaggagtctgcctgtttgacttaattttgtttcccactccacattaaaagatcctttttgcttttaatagggtagaaattggcttcataaagctaatacagaatctcagagcctcatccttcaagctaatgaagaattgtgtccaaagaagttgcttctgcctagcttcatttttcagtttttttcttgtaacttctgcattttttgttgctatttatgtgattcaaattataccagtttataggcctctcacaagtaaaatgaattacctgtttgtttttgtatgcctattttagtcagtttgggggaagggatctgtgaggaaaggataagtcatagagcacttttcttttttaagagacagagtctctctgtgttgctcaagctggagtgcagtggtgcgatcatagcttactgcagcctcgatctcgtgggcccaagtaatcctcagccacctgagtagatgggactacagacatgcactactatgcccagctaatatattttaattttttgtatagagacagggtcttctagtgcttcctaggctggtcttgaactcctgagctcaagtgatcctcctgcctcagcctcccaaactactgggattacaggcatgatccaccgctcccagccagaacattttcttggttgatgggaagtagctgaccatggtatttagaaaacttctttctcatcgattaaagaagcagtactgaaatcaatgcggaggaatccatatatcatatttacttctggtgtgtagaagtggaaagggaatacatttgttgcttacttttttgtacctttacatgtgattgatcacttgtgagttttttctttcaaacatcttaaagcttccagagctttttctagaaaaaaaaatcagttttaagaatcaccagttctaaaagggtaatatcttattcatctttctgagaatggagtatcatgattcatgaattagatacttgcatcttaacatttgaaataatttaattttattattttttagttcgaaaactgtatcttcgggcaccaaagagcattgttataatcaagtaccagttgaattaagtacagagaagaaggtttgttttaaagaaattgttctgatttatttcattctttattgattcaaattctgtttaaaattttatattttaattcctttccaattaaagagaaaatggcatatataacaaagcataaaattcggccagggaagtgatgtgaacagactaaaatttattgtatataatttctggggctaataaagaattggaggtatttgagaaaggaattaatttgggttcttttaaacctatctgctaactcatttggcttagagtagtcacatgttataatacttatagttgatcaaaaaattgattcctaagtgttcttattaaagacacacacacacacacacacacacacacacattctctctctctctctctcacacacacacacatgcacacacacttatgtactttcttgctttttttgacctaagatcttagataactattacagattaaatactaatccactggcagacttcagctaattagaacactggaataataggcaagcatagtgaattacattttctggtgaactttttctgctttattgaagtatgcagaatgtaaatgaattgtttttataactttggcacttgctgtatcttagaacattcttttgatgatttattttctgtagttttgggagagataagacattggaatgcgtttctaactacctttagaactttagaaactgataatttaggaggttattttcaggtgattaatttgacagcttgattaggcaaagaaaaaattgtgattttgagatttttgtttcttattttcttcacatttaaaagttttttgaaactttttttaatggacctttatatgtttaaatgcagtctaacttggagaagttatattcttataaaccatgtgataagatttcttctgggagtaacatttctaaaaaaaggtacagagttccatatttctatgttctatacttgctttatgagtacttttttttctaaagagaaagaactgtcagatgttgggctatttcattggcaaaaggaagttaaatttaaaacataagcttttcagtattagaatgatcaaagtgagctataaaagaataatgttaatttaatagctaacacttcttggatattactgtttgtcaggcattatgttaaatgctaagaactttatatgtgatatctcatttaattcttacaagagtctaacagctgttactatttatcgccattttatagttgaagataccaagggttaagaagttgacaaacttgttcaagagcatacagctaatggccgagctggctttcaagtctatatttgtctacctctagcatcaagacactatttatttttctttgtatgaaatatatacaggcatactttgttttattgtgcctggctttattgtgacttgcagatattgcatttcttataaattgaaggtttgtggcaaccctgcgtcaaacaggtcatattagccccattttccaatagcatgttctgttgtcatgtctttgtgttatattttggtagttcttgactggccattcaccatttctctccctctcctcgggtctccctgttccctgagatacaacaaaattgaaattaggccaattaataactctataatagtctctaagtgtgtttttttttttttcgagactgagtctcactctgttgttcaggctggagtgcagtagcacaatctcggctcactgcaatcttcgcctcccgggttcaagcgattctcctgtcttagcctcctgagtagctgggactacaggcgccccccgatcatgtctggctaatttttgtatttttagtagagatgggtttttgccgtgttggtcaggtggatcttgaactcctgaactcaggtgatccgcctgccttggcctcccaaagtgctgggattacaggtgtgagccgctgtgcctggcccatctctaagtgtttaagagaaaggaagattcacatgtctctcaatttaaatcaaaagctaaaagtgattaggcttagtgaggaagccatgtcgaaagctgagataggccaaaagctaggccccttgcaccaaacagttagtttgcaaaggcaaaagttcctgaaggaaattaaaaatgctaccccagtgaataaaacaatgataagaaagcaaagcaggctttttgctgatatggagaaagttttagtggtctttataggagattaaaccagccacaacattcccttgagccaaagcctaatccagagcaaagccctaactctcttcaattctctgaaagctgagagaggtgaggaagctgcagaataaaagtttgaggccagcagaggttggttcatgaggtttaaggaaagaagccatctccataacataaaagtgcaaagtgaaacagcaagtgctggtatagaagctgtagcaagttatccagaagatctagctaagatcatcgatgaaggtgcctgcactaacagactttgaatgtagaccaaatgctttctaccagaagaagaagctgtctagtactttcatagctagagagaagtcaatgcctggcttcaaagcttcaaaggacaagctgactctcttgttagaagctgatgcagctggtgactttaagttgaagccagtgctcaattagcattctgaaaatcctagggcccttaagaattatgctatatctactctgcctttgctacatacatgtaacaacaaagtcttgatgatacctgtttacagcatggtttcctgaatactttaagcccattgttgaaacctgcttagacaaaagattcctttcaaaatgttattgctcattgacaacacttagtcaccaagagccgtaatggagacatacaaggagactaacgttgttttcatgcctgctcgcttaacatccattctgtagctcatggatcaagaagtaaattaaccttttaagtattattatttaagaaatacagtttgtaatgctttagcttctgtagatagtgattatcagagatgggtttttaagaggttttccagaaaaccttctggaaaatattcactattctagaagtcatgaagaatatttgtgattcaggagagtaggtcagaatatcaatattaataggaatttggaagaagtcgattcttattaaaatcaagagtttagtgatagacatactgagtttgggatacctgtggagtagtccagaagttaatttaaatatatgggcttagtgtacagaagtgagcagggtgcttatatatgaataaatattattttaagatatatttaaattttccttaaaataatacctatacttgatataaaaagttaattggaaattagtggcttatgacaagcataccagcccacactcttcccaaacccactttgctcttattcatagaagctgtcatcttcaaatcttccagctgatttccctggcgtgtgccttcttatttctgaatgacacgcttagagtactatttttttgacttagcaattttagaaattttctactcatctcctattatggtagatttcccctccttcattcctcctccaatataattatatttcgtcatattaataatttgtttatatatatttttaatataatatgataatattgtatttatattattaaaactacacaaatattatatacacactactaacccaaccgtgttattatggccaccactacctttatttttttccttgtgttagtgattgtctttgttttattttcttggttttgagtattccttttactaattttcttttttcctatttcaatctctcattatttgtttactcatttggagtgttccttgacttttatcccctcttacctagtgacattttaattttagttatcaaatttttaatttctaagaatgcttcttgttctcttcttgtttcttcttccccaccagccaaaaatctatgatgttatagcaaggatcatacattgtttcccagtaggttaagaaaccttggttaaaacctgttgtatcccagtaagttaaaagacgttaacgtgtcatcttcagtatggatgaaagaatattttctttcaaaagcagttggttgaggaagagaatgggacaaatgctctttttaaaacaccaattttgtgatgaactcaaattgcaattttaactttaccattataatgaatgtatttgatccaaaatgtttaaaatctaggctgttgtcatttaaataacaaattaccttactggtatcatgaagaataaatgtttgtactgatttggaaagacattctcatttaggggatgaaatagaaagtcaatgaggagaaagaaaagcttttattatttattttcttttaaatattttagtatcatggtacagtcaccagaaaaagcttacagttcctcacagcctgttatttcggcacaagagcaggagactcaggtaaggcttttgtaaaaaggtaattagtttatgataggatagttatgattctatgtatgcttaaaattctgtattttgccagcattttaaaaattgttcttaagctaagagtctgagtttatatttcagtttatattcattctaaggaaaaatgtggtatctgaagctctaaaaataaaggactagatcttttaagtacactttaaaaagtgttgtttctttgttttttgttcagattgtgttatatggcaaattggtagaagctaggcagaaacatgccaataaaatggatgttcccccagctattctggcaacaaacaagatactggtggatatggccaaaatgaggtaaactatcttttgcatgtgttctatttatttccttctaacaaaatagatttggaaaatatatctaagttgataatatgaccatagcttccactgtcacatctgggaggtgactcagattccccctgctgcgatgcttatctctttgccaagctttagtaccgtgtttctgtatgaataaaaaccagttacgttttcagcaatcatattcaatatttataaaatctaactcattatttacccaccctgcattttatccaaatgccgaaactcctctttttggattctttatttttgattatcttaccatcacatttgtagtcagaggttcctaatgcttaaaacctctgatctgaattttctctcctccaatataaaaccccttcgtcttcctcttcttcttcttcatttttttttttttttttgtctgaagacttgtctcactgtgttgcccaggctggagtgtagtggtgcgatcactgctcactgcagccttgaccccctggactcaagctatcctcgcacctcagcctcccgagtagctgggactacagaacatgccaccatgctcagctaatttttgtattttttgtagagacagggttttgccatattgcctaggctggtcttgaactcctaagctcaagcaatcttcccgcctcagtctccaaagttctggcactacaggtgtgagccactgtgcctggcctctttttctcatttaaatacttttcataccttttgtaaaacgggttccttgttgcctgtctatgccttcctcctccttcttaatgacaccacgttaattctgactgttttcccttggcctgttgcagaagcctcttaactattaacccttcattctctctctctgtttcatctgatatatgagtaccaaactaaatcttcctttatcatatcttacttctgcttaaatgttttttttctagcttagaattcaaggccctctatttatgaacttaaacttacttttccctctaagttacagaatttgaaatggtttatcttacctggattgtttatcacttgttgaagatccattttcaacttccatatatttatttacagtgttgcttctccttgtagtttccttgattcctcaaaactccttttaagaattcttgaagatctcgctttattactatttctcgctttattactgtaaagactatgagaaggtctttcatgatcttatcagcaaagtaattcctctctcttgaattcatagaggactttcagatgaattctaaagatgcttctgtagcacttaccacacaatgctatattttatttttttgtaattagtggtaaacaagtattattatatcttctagattttaaactccaaataaagatactagctccttacctttttgtgtgtctcctgtagcacctagcacaatgcctcataaacaggaggtgatcattaaatatttagaagaaattatttcccaagaatagttgcttggtaattgtatttgtcttttacttccttttaaaaaattgtttctgtcactaaattgcatccaatagatgttacttgagtgcagaattttctaatgacattacacagtgctacatctgacactaattcttttgttaaaaaataaatattctggccgggcgctgtggctcacgcttgtaaatcccaggactttgggaggccgaggcgggcggatcacgaggttaggagatcgaggccatcctggctaacacggtgaaaccccgtttctactaaaaatacaaaaaattagccgggcgtggtggcgggtgcctgtagtcccagttactctggcggctgaggcaggagaatggcgtgaacccgggaggcggagcttgcagtgagcggagatcgcgccactgcactccagcctgggtgacagagcgagactccgtctaaaaaaaaaataaaaaataaaaataaataaatattctaagaccatactttaatagaggtgttttttttttttttttttttttttttttttttttttggtgatagagtctcactctgtcacctaggctagagtgcagtggcgcgatctcggctcactgcaacctccgcctcctgggttcaagcaattctcctgcctcagcctccggaatagctgggactacaggtgcgcgctgccacccccggctaattttttgtattttagtagagatgaggtttcactgtgttgtccaggctggtgttgaactcctgagctcaggcaatccacccgccccggcctcccaaattgttgggattacaggcgtgagccacagtgcctggcccagaggagatatttaatgaaaaataataatcattagataggcagatttttagaaggagggcatcgaatgggttcttggatattggacacaataagaaatattgagctaaaagtctgaaggaattggcagatatactgttacaggtaaacactttgtagaagaaaataatgaatgagactttcttttgagattttcttagcctcttagttgttcccagttaaagcctcatatttttccttttcatgacaataaaaataataataaaatcagtaataaagtgaatatatgagatgttaacctgttcctttatgacaatgtcctgtttaccaattaacagtgtgtttttgtggtgatgggggcaagacaaatctttaaatggtggaaagcaaagaaagaaattataaaacatgattagttgtattatacgttgtttttggttgttggaaaaactatacatttattgagagaatcattaggaagctgaacatcagctatattgctggagtgatactgtttcagtggtttcttgacctttttgttgttgttgttgttgttgttaaacacagaccaactacggttgaaaacgtaaaaaggattgatggtgtttctgaaggcaaagctgccatgttggcccctctgttggaagtcatcaaacatttctgccaaacaaatagtgttcaggtaaaatactgtggtttgcaggagctcttagagaataagcattttttgtaaccatttcaaaagtaccctccagaagcaacatttgctcactttatttgcatttccatactggacacttagaaaatgaattaaaattgtttttacagtcaatctgttgtaaaaacatgtcagttatctacttttaaagatgatactaaaaagtagttgtccaggctgctgatgtctttctatttcattgggaggttttgtttttaaattggaaacattattttaggttgataaattataattttacattcaaatgtggtagttggaatttaaagctggaaagttatccttgctatgagttggtcaggagctcagccactttcttttggtttagcatcttctctaatctccctccccttccagtaatgctgtcttttgatagtaagtggatttcatattattctcttcagttttaatagtgtttccttcatatccttttattattgcttgttctgccctaagtgaccatttccagaaatgtcatttaggattttctctaaactccacgtagcagactctataatgcatactctgcagaaggtgaggcagtgggaggtagaggggagactactagactaggagtcacggaatcaggactttagttcttccttacagttgttcacctggtgaacctgcacatgtcctttaatttccttgggtctccatttcctcagctatacaatggaaatgacacttcctcccccacatccaggaaacaacagatgacattagaaaatagaagacatgggataagtataaaatgttgaaagagttaaacacattcaaggcaatattaagggattattttttacttccaagaagctcctggaagctttgggcaggcacagttggatcctactttagaaaaatctttctctaactataagtagaaaacccttctgctttttgaatgtagcatttccctcttttgatatagagtatctttggcaactttgaattttctttttcatactcttatataagacatcatgtgaaaattcttatttcttactgagtttttggaaatgaaattataatgtcttaatagtttgagaaagaatatcatacctaccagcggtaattgagtaagttccctctctttggacacttgaaagtagtatcttctttcatgaattagtgatattatttaataatgaatgagtgatctctcctaactccccttcagaagaggaaaatgaagtaggggaaaaggtaaattccccaagggataggtatgaaacctttatgaaccttctggatagagaagatgactgctgatttctgtgattagaaattatacttgggttattctgcaaattgaaatgaattatttaaaaaaaaacaactttaatgtttattaagcaagttttgttattcatgagtttcattagccttttattttttttttaaattttgaagtaaaatttcttgctgtcacaatacacattaaaaattacaaatatgacacatattaaacacattaagatggccgaataggaaaaatatgctaaaatatttttatataaatacattttttgagaattttgagaatttctggaacaaagtaatgatataatccataaatgtacaattaaagagtttaaggatatccaaaatacttggcaaagtaatctgaaataatactcttaggaaggtagggcaagaatgtgattctagtaagcaaaaatgtgatcaaatcgtattctagtcccagctactcgggaggctgaggcaggagaatggcgtgaacctgggaggcggagcttggagtaagccgagatcgtgccactgcactccagcctgggcgacagagcgagactccatctcaaaaaaaaaaaaagactatatgaacatgtatggcataaatatgtacaaatattatttattttaaaaaaattcaggggtagggacagggtagttagaaaatatctaaggatgttcatgaaataatactggctatgaatgacagttgatgaaaccgggtggtgcccatcttattccctcgactcgtgtatatgtttgatatatcccacaataaaccttaaaaaaaaaaagatgagtggtcaattataggaagatataaatagaaaaggcaataaggacaaaagttggcaaagcttacctaagcactcttcagataaaaagacatttttgctaactagatttgaatattatagtttaattgtcaaggaaaatgcctcaacttaatctttgttaagagactacttaaggcactatcagaagttccctcatggcaaggtgcaatccctcatgcctgtaatcccagcactttgggaggccaaggcaggcaggttacctgaggccaggagttagaaaacaacctgggaaacatagtgagacccgacctctacaaaaacaatttcttaaaattagccaggcatggtggtgctagcctgtaatcccagctatttaggatgcttaggcaggaggattgcttgagcccggggatttgaggctgcagtgagccatcattgtgccacaatactccagcctgagtgatagaaaaaaaaaaaaaaagtgtctttgttatattccaaacttgttctcaactttcaggtgagctggcttcctgtataactcttgtataggacagaacatactggttggggcaagtgaaactgtctagttgtatgcctcataaattaatgaatttcctttctaatatatacactgatatttatacacacatacacataaaaccaagctcaatagatgggtagtgcagctctattccccaaaacccaactaccctgtaacaagacacattagacttttgagattgcaaggatgaggactgaaatgctggcctagaccatggtgttgccatagtggggtgaccagtctgaatagccaacaatgcttcctcagtaaatacccattttgtcttggtgggatttctataaattgcaaaatgcagctattatgaagctgtaaaagagaaacagaaacatgtaacacctgggactgttttattaggcccaccgtatgctcagaacatgaaatctccactgctagggttatttgattgaaattatcttttgtgttgatgtgagagtttagctctgagattcttccacatgtaaaatgtaatcccccaaagtatttggcaagcacattttattgccttgggtcagataattgaaacattaggcatcatatatatagcatgtaaaaagtaaaacagaaacatttatgtttctcaccaagcagtaaattagtactcaactaataaatttcttaaactccctaataacagaatatggaaacaaaaaataaatctttccaaaagaagagctcatggacacatttcctcatatatgtatacataatatagtagaacacatgataaataacctataaaaatgataccaatatcattcatcaagagacgaggctcttctttaaattattaatttcatctgttacaggttttattatgactgtagtatgctgttttcatctaccttttatgtgtagttaaaaaaatagttttctatctctttacctttatttcagcctttaaaaagattccattattttttcattaatcttgtttttcagtttttcccattttttcttttaaacatttcttaaggaaccatatttaagattttatagaatacttagatttctagttgggatgtatcatttaaaattagatatgtagagagagtgttatgatatatttccttacgatatattagtggttatagtacctaaatttgaatagtgattctgttcattcattcattcattcattcaatattcacttccaggagattggggacttatttaaagacagagtagttcacattatagttcctttttttagtccttcttattcgttaaagaaaagactaggaaatgtttgttattacaaatattttattaaaattttgtgtgctctagcattattttaccttttaaaatcaatatgttaaaaatccaacttctttttgagctccccataaaaagggaattatttgttgcttatgggtttaacttgtgttatttttttcttaatggctaattatcatacatatattctattattgtattgatattactgatcatttgtgctacattaaaaattctgtagacagacctcttttcaagtacaaaacctcaagaagaacagaagacgagtctggtagcaaaaaataaaatatgcacactttcacagtctatggccatcacatactctttattccaagaaaagaagatgcctttggtaagtgtgactttcatgttacagggaatttttttagtttacttaaacttgtgttttatcagctttttagtattaaagttctgacttgggatcaatttcctccaaccctacaataaatctcagtttatctttaattttaaaagagaatgttgttttctttttctgttaagcctccctgttaagtaatagcagcaagtttagtttggccatgaatatcttctagagattgtatcggggtactgataaacacatttgtagctcagggatactgcatcagccatattttaaaatgggactaacagtttaaaaactataaatattcacagtgttaagaaacaatctcaagatgcattaagaaaaaggaaggtgcaaaacagaaaaacaaacgtaaacgtgtgtgcatatgcatgcttatatagtcacatattcttgtatgtgtacaaaaaatacacactggatctctgcaagcatagccaagcaactggaaatatgtttttaaaaacttgcttttcattctatctcttctagtactgttttgatgctctttgaaaacaatctaattgctgtaacaaatgaccatacgtaggccgggtgtggtggctcatgcctgtaatcccagcacttcgggaggctgaggcaggcagatcatttgaggccagggatttgagaccagttggacaacatagggagaccctgtctttactaaaaatacaaaaattagctgggcgtagtgacgcatgcctgtaatcccagatacttgggaggcggagacatgggacttgcatgaacccaggaggcagaggttgcagtgagctgagattgcgacactgcattccaacctgggcgaccgagcaagactcggtctccaaaaaaaaaaaaaaaaaagaccatatgtaatgtttcttcattgttctaagataaatctttaaggctgttgaggttttttgtatacaaaatggagagtaagttttaatgggatgggacaaaatgaggcttacagttgagtttaatttgagttcacatcctgttgacattaagttgatttggaacaagtgatatggtccaatgcctgcttttctattgtctgtggttccatccactagtgcctgtgttacacacctcttgttcaggttttatcatttaaaataaataagaataaacagtccatagcttatcttacttactgaataaatgctctaatttgacagtcatgtttcttaaagttccttacaaaggccattgcccaagaaaccaaataattccattatactatttttgaaatagaacacataataaatgggaattttaagttcagtttcttatgtaaacaataacttctatgtacatgttaaatatgcctgtatatacctaatttgaccatgtatgtatagtagaaatgaaaacagttactaagaaaatttgttattggctccaaattttctgaattaagtgtattctaatgctcagccataatatggggtttcatgtgttagtttatgtattcatggttaaaaatgtgaagactgttatatcttcatttgtgtcttttggtattatttggttgtattttattgtgtgatatggtggtataattatccttacctcccaggagtttgagagggtcttgccagttaaccgcagaattaaacatgcttaggactaattaatcaggagcaatactacaattagttggaggtaatttgaaacctggtttcaaataaccctgatattatgcacacatggtgcacacttttctagtagacatttaatgaaagtaatttaaaacctacctttgaaggatgaaaaacattgccttaaatgctctattctgtgaaagtatcaacatttatgcaaatacagtctaaattcagactttgaaaatgtattgaaagagaggatcatgaaataagttagagctgagtgacaaagctttctgagtgtttaaaagaatgttttacctaataaatatctgaaatgtatttggagccacatttgtttaaagaactgtataaatatgtagcactgttcatgtgaagttcaatagtaggaaaatgctgacagcccttgtggaactgtggttattattattttatgaatagagccaatttcaaacacctattagagtcttctcaggaacattttatagaatgcatctggagccttatgttatctctaagcattttaggatttgtcttcttggaaattcatgtaaccaaaccaccatgtgttatttcaagtgtatatagtattgggttacagtttactatgttttcagaaggttgtgacaactattagacttacagagaatgacttctctgccactaacggctttctaaagtgaatagagaggggcgaggattgaattcttcggtaaagctgggtgattttgttttattcaatacagtataataagtataaaaagtagaacctatagagagctataatgggggtagttttaaagaaattctgaaaatgaaaaacttaagtaaaggtttagttcattgtttatttcacactgagcatttactacctgaatgttttggacattttatttccatgactggagtggacacttttacaactcactgggttctttgctgatctttctctagaagagcatagctgagagcaggattctgcctctcatgacaattggcatgcacttatcccaagcggtgaaagctggctgcccccttgatttggagcgagcaggcctgactccagaggttcagaagattattgctgatgttatccgaaaccctcccgtcaactcaggtgagaggcatggcctagctctgcacccttaatgacttgatgaagtaaacaagcaatccactatatttttcactgttaacagcattaatcctttatgctattatgaaaaccttacttttgtgattctttttcttgttttaggaaaacaatctttcttcccattatcactcagaggaaagtatactgagaaatttttttgttttgttttgttttttgagacagagtcttgctctcttgtctaggctggagtgcagtggcgtgatcttggctcgctgcaacctctatctcccaggttcaagtgattctcttgcctcagcttcctgagtagctgggactacaggcgtgtgccaccatgcccagctattttttgtattttttgatagagacagggttttccatgttggctaggcaggtctcgaactcctgacctctgatgatccgcccacctcagcctcccaaagtgctgcgattacaggtgtgagccatggcacctggccaatacactgagaaatttttattttccttttcagcttaaggttacaacttccccaccatccaaaacgtgcactttcattttttttctaatttctatctcatcacttgcaaaaaccatatttttctccacattcattcccagtagcttcctgactcctagttcttccctaaatccttctgagtccttgtcattggtttcgcttgagtagcctttctaatcaacacagtcattggtatcagttactgtgacatggaagggacagaccaagttctgtgggccgctacgtagaaggatttcctgtcactttgctgcagaacctcagctcgcggagagcaagcccctttgcttgccctgtagaaatattttaaattattatcctttttttttttaacagaagtaaataggagatacgttagaggattttctctcctagatgtgtaaatacaaacttggggtcttataactcaataaatctgataaatttcttttgactgttaggatagagcagtggccataccaatagcctcatctccaaagctgcagtgaagatactttttactaccttaaagtctttcccatttgtgaacaacttgtgaacaattccccccaagaatttggaagatcactctctgaaagcacagtcaatactgtacttaaatggatctgagcaaaaataagtcacttagaagacaggattatttctagacttgagtgtgacttgactgaaggtctaaagaacaaacagctccttcacttccattgatcacggtggaagcacagggaaaggacagacacggaggcaagttggagtagtgctcatctaagttccagggatgcgggggagtggccaggggacttcaggtatagtaaataaataacctatttataagttatgtcaatgtcatgtttgaaatagaaaaccaaatactgcatgttcttacttacaagcaggagctaaagttggtgcatatggatataaaaatgagaacaggccgggcgtggtggcttgtgtctgtaatcccagcactttgggagacctagatggaaggattgcttgagctcaggagttcaagaccagcctgagcaacatagtgtgacccccatctctacaaaaaataagaaaattagccagacgtggtggcatatacctatagtctcagctacttgggagtctgagtcaggaggagtgcttgagctcaggagtttggggttataataagctgtgatcatgccactgtgctccagcctgagtgacacccagagtgagaacctgtctcaaaaggagaaaaaaaaaaaagtaacagtagacgctggggactactgaggggagggaaggaacaatggttgaaaaggtgggaagggacagtggttgaaaaactacgtgttgggtactatgctcactatctgggtgatgggatcaattgtacctcaaacctcagcatcctgcaatatactaatgttacaaacctgcccatgtactacctgaatctaaagtaaaagttataatttaaaaaaattataataaaatcagaaaataaaggtctgagatggaaaattaaaagaccaaagccacccataagcacaataaatccctccccccaaaaaattatatctattaaaaaaaggtgttgcgccaggcactgtggctcatgcctataatcctagcactttgggaggccaagacgggcagatgacttgacttgaggtcaggagttcaagaccagcctggccaacatggtgaaaccctgtctctactgaaaatacaaaaattagccagcagtggtggcatgcgcctgtaatcccagctactcaggagactgaggcaggagaatcgcttgaactggggaggcggaggttgcagtgagccgagatcatgccactgcacttcagcctgggtgacagagtgagactctgtctcaaaaaaaaaaaaaaaaaaagaccttgtaccctgacaagttttagtttgtgcaggaatgctagaatgactcaagattggaaaaatctttaaatgttaattacacaataagggtaaaaggagaaaaattacctaatgtcatctgagcaacaagaagaagaaatgaaaggcattaaaaattgggaaaaatttatatttgacagtatcttaacaacgaattctgcttctatatcacttcctagctttctgatgataacttcccgtgcagatctgtatgtaaggaatggacgtagtagtcatgctaatctgagtatttatctgtgtgatacttacgaattaacgatgtaagttaataagttagcatttcgtgaacctggttaataccatttgctaaggttaaattagccaaatcctgaagtaagctgtaaaacatccaaggtagggtagagaggcatcttatgagaaagctggccaactctcctggtcaccttctaatcttcctaacttcagaaatcaaggcagagagaggaaaatagtaattactttgtaggattagatttatggttgtcgaaacctttgtttctccagtgcagaatgagatagcgttttagggaaagccaaagactcagatgtcttcttcatgctcatcgtgtggaatttttcttcctttagaaatgtattgtctctcagggcttaaagcaatttgcatctttcgatgagacattgagtaataggcaatattctctgaaataatttgtgcaggctgggcacagtggctcacacctgtaatcccagcactttgggaggccgaggcgggcaggtcactgaggtcaggtgttggagacgagcctgaccaacatggtgaaaccccgtctctactaaaaataccaaaattagctgggcttggtggcacacacctgtaatcccagctacttgggaggctgaggcaggagaattgcttgaacccccatgggaggtggaggttgtggtgagccaagattgtgtcattgtactacagtctggacaacagagtgagactctgtctcaaaaaaaaaaaaatagaatttgtgcagttccccccacccccttttttttttctgttggcatttttgctatcatttagctgccttctttatatcctgaaacttacaggtggtgttggtctagtcagtaagagcaaaggctttgggaatagatagatctgtatttagaccttggctctagcatctcattgttatgtgacctccatcaagtgacctaatttccctaatattcaatttcctcatctctaagacagggagttaatattgcctctcttatagaattgtgagaaatatagtcatgtgtcgcttgatgatggggatgaattctgagaaatgtgttgttgggcgatttcattttgtgggaacctcacagggtggacttaaacaaacctagatggtatggcctactacacacctaggctgtacggtatagctcctgtcttcaaacctgtacagcatgtgactttactgaacactgtaggcaattataacacagtggtatttgtatatataaacatagtgaaacatagaaaaggcccagtagaaatacagtgtaaaagattttttaaaaaagctgggcatggtggctcacgcctgtaatcccagcactttgggaggccgaggcaggcagatcacttgaggtcaggagttcaagaccagcctggccaacatgatgaaactccgtttctactaaaagtacaaaaattagctgggcgtggtgttgggtgcctgtaatcccagctactcaggaggctgaggcaggagaattgcttgaacccaggaggtggaggttgcagtgagtcaagattgtgccactgcacttcagcctgggagacagagcgagactctgtctcaaaaaaaaaaaaaaaaaagagataaaaaggtacatctgtacagggcacttaccacgaatggagcttgcaccctgggagttgctctgggtaagtcagtgagtgagcggtgagtgaatgtgaagacctaggactgtgcactgctgtagactttataaaccctgtgcacttaggccacactcacccctgtgatacgagtctacctactgtataacgtacctgcatatgtacccttgaaactaaaacaaaagttaaaaaatttatcttcttttgccaataataaattaaccttagcttactgtaatgattcttctttatgaattaaaatctttttactcttttgtaataacacttggcttaaaacacaaacatattgtacagctatacaaatatattttctttatatccttcttctctaagattttttctgtttttgattttgttaaatttgtttttactttttacattttttttgttaaaaaccaagacaaaaacccacacatcagcctaggcctacatgggctcaggatcatcagtctcactatcttccacctccacatcttgtcccaccaggtcttcaggggcagtcatatgcatggggctgtcatctcctgtgataacaatgccttcttctggacacctccagaagggcctgcgtgttttacagtgaacttctaaaaaataataaaatgtatagtatagcaaacacataaacatagtaacatagtcatttattatcattttcaagtattatatactgtacataattgtacatgctagacttttacacagctggcagcaaggtgagtttgtttacaccattaccaccacaaacacatgggtgatgctttgcattgtgatgttacgatggcatgatgtcactaggtggtaggaacttttcagctccatgataatctaatggatacttgttcctgttggctgcccgtcgttgactgcaacatcattatgtggtgcatgactgtaaattagatactgttcagaaagctttggcacactggtaatagcaaatggtggtggcaaatatgatgatgatgatgatgatgattgaagacatagatggtaaaattttatggtgtcttaaaagtaccctctaaatatgattatttttatagtctgtccttttgaataggcacttaagaatgtatgaacttaataagtatataagaaagaatgttccccaaaatatatcttacagaggcatacaatttaagaattcaaacaggttgtaatggggtgtgtgtgtgtgtgcacacgcgcacgcatgcgtgctcattcacactaaagaattcttgggcatatgttcctgaatgtcctaaatggacattctaacatcacttcattatgggcagagggaaatggtaaagaaaaatttcatattatattattcagccacatattgacagcatctgttttatttgcctatggtaaagaattgaagcactgttaatttgctttttaaatcatgtaggcacaaagttatcgaactttagatttagaaatgaaactggaaatcattacactttccctttcctatccccaccctgttttggagagaaagagtgtgaggcttagagagttataaaactgttttaataccatgtctaagattaataactgaacaagtttctctttttactcgtgttaaagttgtactgccaattaacttaaaagaaagaaatatgcaatttctaatcctgatataggatatgggtatataaactctaacttgatgagtgaaacaaattaacttatttataatcagtttcatatctttatttattgagtgtctttaaataccccttacctttaaagtaagaaatattaaaatcaagcagaatataataatgaaaaattcttaagatatacttactaaaaacttatccttcggttaatacactgtatgtaggttgtacatacaatatgaaaaagtatatttttgtagcctacttttaaatccagaatagaggaggttaagaaggttgtgataaccatgagctcttttttttttttttttgagacaaggtcttactctgtttcccaggctggagtgccgtggcacaatcatagcttactgcagccttgaactcttgggctcaagcaagccttccacttcagccttccaagtagctgggaccacacctggctaatttttaagtatttttgtagagatgagttctcactacattgcccaggctagtcttgaacccctagccttaagcgatcctcccacctcagcctgcctaagtgctgggattacaggtgtgagccactgagcccagccctcttttatttcttttgatagtacactcataatcattaaactatcatttctggatgtgagattgtgcttttggattcttattttttctttataaaatactttttgttctcttactggagaaaacattgttggattataaatgatataacaaggaatgaggatatacatactataataacgattcagatatgttattttcatattttatttaactgtagccatgccacaataatttagagttttaaagaacaagtttgattgaaatctaaactttgtacaatcctgaattgagaagtttcctgtattttattatgacacaatatttacctaaaaatagagtaattatgaattgagaaaacatagctattaatttcatactcttatttgttaagtagattttgtctggaaaactgttcatatttaaaggagctttgtacctttgtattctttttgtttttccttgtttatataattttaaactctgtttatggatttgggattctaactatgctaaataataaattaaggcattgaatgaagtacctagacagtattttgattaattttattcccccattcttaatgtgcatgtaactggaaaattaagagtggcttccaagggatctactacaaaagtaaggttaatatgatctcttttaaaacactgaaggcgtgtagccagtgttgtcattaattctgcagtagatattttcagcacttatttacatgggaagttagagcagagtaagatgcacctgtaaagctaaatgccacttatttgcatatatataaaacgcaggatgaatttaccatagaaatataaagggtacttatagaaatgtattagaaaaatatatgaatttttaacttatatctagaagttaactttatacatttaactttaaatcattaatagtggtttaacaccataagcggatgtttatgcatcatcattttatgaacaaaagacattctaattttagaaataaagtgattcaaaagagaataaaatatcttactttttcttttaaaattaatttgtttagcgcattacatgataatagctcaagcttgtgtgatttttccctaaaaaattggtttataaatattacatttatagtatgaagaaattaatcatacatagtttatttatctaatttctaaatacccatggaagaaaatgaatttaatggaatgtagttgtgtattacttggtttcgagtgtgggaaaatttatatggtctttctaaaacagcactgtcagtagaaatacaatgtgagctacatatgcaattttaaattttctagtagccacattttaaaaagtaaatggatgcaatttattttgataatataatttaattagtctactatatttaaaattttatcatttcaacatgtaatcaatatgaaaattattaatgagatattttacatacttttttctgtaataagcctttgtaatcaggtatgtactttatatatacaacaaatcttctgatgctaaattttaactggaaatacttgatctgtgtttagcttttgtaaaatttactgttgaacaacgtggactaatgtgcctaagtggttccaaacatattttaaaatttgaagacaaataaaagggaactcaaagtaaattgggatacatacatacaacagaatactgagccattaaaaaatgatgaaatagtaaaattgggggaattttgatgatactaggatgatataatgaccaagagacaaatacaattttagtttggttgagagatgtgatcatcacgttgctgattttactatgtatagaggttatcttttcctttctaagattttgaaactttaattagttaacccacttacctagtttctattagctgtgtaactttctcttcctgttttttgttttgttttgttttgttttttgctttttaactgcagtattttgaggagtcttggagtagcaagctaatctttggaagaaaggaaaatataaacctgaaaactaacaatttaaagaacgtcttttcaggttgtcatttgaaaaatacttgatttctgatcactgatttgaattgagtgtcaaatatttgatatgttttgtaaattaggtgaagatgagtgagtaggttctaaactgcttgggtttaccgcactctggagcattgcagaagaatgtgatgttggaaggaagtgctgaaacataattattggcttgcctataggagggtgctacataattttagaaggtgtcaagaaattgacacagtctgaattagttctgttgagttgcaaaaaatgtaaagtttcttgattctgaaaataagaaatatgttcccagaaatctcatctagttaatgtgcttttaaaatcattgatgtctcttgttattacaataatagccattgaaagaatcttttttattagaatgttatttacaggtacgattagcttctatttaaataaattatttttatacttgatcttaggcaaaaggccaacaagtgatcagaataaattattttaagagaaaactaattataattgatatttggaattggaagcacaatttcctttagaacaattccacgaatggttgttttgattctcaaggcagcccacaaaagacagtttgaaacacaatttatgcagtgtcaatagtactgacctgactttggatcttggaggcaggggcttcaggtgatacccgagtggagtttttactccatttccattccgtaaggctataggcatttgaaagaggaaacttttctttggcaaccttccaccttcctttctacagaatatttcagtatttctagctcataggttttctaaaatattctctgtaatttattttgaaatggagtttttttatcgtttacagatatgagtaaaattagcctaatcagaatgttagttcctgaaaacattgacacgtaccttatccacatggcaattgagatccttaaacatggtcctgacagcggacttcaaccttcatgtgatgtcaacaaaaggagatgttttcccggttctgaagagatctgttcaagttctaagagaagcaaggaagaagtaggcatcaatactgaggtattaattatatatagaattttcataaagtgtcagtttgttcaatttgcatatcctagtactagaatgctgtatttttttgaactgttatgaattctgatatgattactttctctatgtgctacatttcctttgcttttcataaatatgatctgagaaaagtgattaaaaaaaagacagtaaaagggaggtttagtccatctgtttagcttattatgtagaatgtcagcttaaattttacctgtacctcatattgaccgtatagcctggaaaatctttcggaggtatagttaatggatttaagcatatggcagtttatgtagttaatgaaagtgaaaacaaattgtattataaatacctcccaaactggtttattatcattctatcattcttcatgctctgttagtatgatattgaatatctgaggtaccaggattattgttgcttgtggctctgagcatttcgtagtgcttttgcatgatgagagaaagattacaaatttagtattatgttagatggtacgttttattaaaatcaaatgcttcaaaaataattgctctgtgtatggcatgagataaatagcaatcagatatattgtttaataatatgactctattaaatgatggcataaatttgaaaatttgaccttcggtatcttccgggtctaaaattatatgactccattataaatattttggaaatgattaactaaaaaattgtttcaattcttagttggtaaattcaatgtggtagtaggtggtggtgattattttgtattagagaattaggaattacacttagttctaaggtaatctttataggatgtccagcaattaaacccctacttttttgaattgcttaaaaataagggaactgatctttttaaattctgtacttgagttacgtctgtatatatagtcatgtcctagataatctaatggaacttaattagttggaaatctttatattgtttataactgaactagctataagaggaacattaaagaaaacatattttgagtggaggtaatgaaatttagcttctaatgctcagccttttatttctgtaatctataccagatacctaagaccctcttattgtttcccagcttcaacctgtcagtatagaaaacggtgtaacttactattttttctcaatattgaagcacatttgtagtgaaatattattttaactatatattgccatttttgctttttccctatttcagtaacatttttcgctatttcagtaacattacatgtcaacaagagaatggtgggtattttggggggggttgggtggggagaaattttactaagcttgctagattctaaaaggtataccttatttggccccttttccccatttaggggaacaagggtgttggggctgggaagtagataagaggtgagtaagtcatccaaagcatatgtcttcattagcctccctgtatgaaaagctgatttctgtagagtgttggaggcctactttcagaatctgtcatatgttaacattcatcttctctactgacctgatttatatcccttagtctatttcattttataattatgacaaaggataaagtcattagaacaaattctttttattagttgacgtattgttgtgtttatatctcttgtgtttgttattaagatggaagctcaatcatgtccttgtttaacagaaaggtgatgtcttggcattgataattctgattcaatatccataggtacatggtggattctttaaatatttagtattcttttatttctggaaagttttcttaaatgatagtttttttaaaatttcatttctataaagttttcttaaatcatactttttagtgttttattccattacttcatatttcttcttcaggaactcctgctatacatgtatgttggatcttcattacccagcttcaatatttttcacttttcatgcattctttttatttcttcatttctctttaaatttttttcttccttttcaccttctatttctcttttaacataattgtatttatttctgtattccacatagcttagtattcacttattttaaaattattttaaaacgttttttagatttaaaaattctttttttatttatatatacatattttatttttaccaaaggagcaacactattaactgaagacttctataatttttttcttttatttctgattctttcttcggttttccccctcagttttgaacttttctaattttgatttgtgatgtccttttgtattttagataattttcctaatgttttccagctcatttggaaaggctacagttttattctgtacctaagcaagtctttctggtgtcaaagatttgaccttgatacttttcttttgctcattttcgtatgagattagttttcctgtactttcaaaagaaggcgtggttcaagatggctttcccaatttcacatctgtctctaatgtttttgtgtaatgtctaaaatatggaaacttggtttatgagatctactctgccatttttatctgggctttctcttccttttgtctctgttgtacctgtcctgcttggttttgatttaaccccagtggtttctcctgaatgtggagccttctcctagaaggcagcctcggctagtcccagggttcagagtagccagctgctctcttcacctaagagaccactgtggattccttgtactcacttgctattggcttggacaaaagccctcccattttcagatgctattatcagattaatctctcattaatctgtctttccagtgtatgcctgtgggctatcttggggttctcttgttatcagacacctccctgctggcctctgctttctcccgtacagatgtcagtactgtgcaggtcttaattgctgttggtggtttgcccctacattcttacagttttagtttcccaaggatacctttaaacttggttttattgtaaatgtcgacaatggattttgggttttactatctagttctgtcttaattctggaattcagaaagattaaaagctctgttgttgcagctgctgccacctcttcccagtaccctctcctcctatgtcatttttttcttcttatttttcttgactgtataagagagaatgtatgacatttcctgcttgaccgctgagtttgattataaattaaaatacacaatattttatacaaattgttttgtagaagatttatttacagatgctcattcacaggtaaaattgacttatgaaaatagttttcatgacaaatgtatcaggctcggtaactaaatatatggattgatcttgtttataaatgaaattaaatgtgaatgtaacttacatatttctgtatttgcttacatccgtatgtacacatataatcagcaaatgagttgatgtttcctattcgtaacttaatggtaatagcttggtaacagagttgggagtattaaaaagatgtaaagagccccttaaaattttgttgctgggaattttagtgttctactgatgaaggaaatagacactggaaggcgttgtttctattaggtaacttagatatcatactgaagacttcaaatacttattgttgacactcaaaagacacacttagtgtaagtaagcatttccccgcttttcccaatgaaataagatcattattataattccattataaatgctgatgatcatatttatagaaatatagaagataagacttgaaatgatattcgctaccaattaatgagtttgaagaagaaatcaggatgtgttttgctattttacatttattcttatttaactccaaagaattcagtgatgttatgtactattatttccatttctctgtgaagacgttgaagcttaagtaacacgcataataaggtcatacatttagcaagtggctcaattaaagttcaaacctggttctgcctggtttcaaagtctgtgctactccatggtattaggctacaacatgacttagggtttcttcctctgctctattgctgttcagatgtactcctcttttggcagagtgggagaaaatttttgcaatctatgcatctgacaaaggcccaatatccagaatctacaaggaacctaaacaaatttacaagaaaaaaaaaaaaacattaaaaagtgggcaaaggacttgatcagacacatctcaaaagaagacatttatgtagccaacaaacatatgaagaaaagctcaacatcactgatcattagaaagatgcaaaatgccttttctgtatgccaccttatatccccagtatttattatttctaagtcatagtatcttacagtgtatataagtctcatccgttcttttgattttctcttccctgcttgcaattgggtacctaggaacaaagttgcaatcttagccagttttttctttagcctttgctgatgtgtgaaaagcccttttttctaccctggatttctgtacttaagctggaacagctaagtttttaccttttttaaatataaagtttcagagtcttctgccaaggatcttttgctgttttcctactgttaaatatttcaaagccttttttaaacatagggaatataatcaaacatagcaagcagctgatgaacaatatctagatagtcttcattattgaaatggaataaatggtatttttgtattttaggctaacagacaccttgtaccttagataaggccaaccttctcataaaatccctcagttacttttattaataataaccaaattaactctggattccagggtgtactcatgatggaatgatttctctgtcatgttatcctgaggatctagtactctgagataacataagtgtatgacactttaggcttatgaaacacttagctacttaaattatttaattttttttcatgtgcagatggtattgtacccaaacactacctttgtgtgtgtgtgtgtgtgtgcctgtgtgtgtgtttttgagacagggtcttactctgctcaggctggagtgcagtggcgtgattatagctcactacagccttgacctcctgggctccagtgatcctgccaaagtgttgggattgcaggcgtgagccacctcacccagccttaaattatttttttttcaaggatgtttaacctgagggttagaggctctttggcacgtgagctgctgaaatgtgtgtgaaagtgttgtgcacgtgtatgtttctctttttttctgggaagtggatctgtagtgattcttagatgagtctatgagacaagaaacttttatttttttcatttatttagcgaatgtttgttaagcgtactatgccttggccactctacagggtgctgattggaccagtctgtctacctaccgttgtagatgttagaagctatattcttttcacatgcctaatataactctttgtgtatgtatacatgcccaggcatgttccttcctcagaacattaaattcaccattttggtcaactcaaagcaagtacaccatgggacacagatctgaaataatgtccagatttttacttactgaatgaggtgtgttgagtgtataagactacatgatgagatggcaagtaattgcctgaagaaatgatgtagtgattttgtgtgtcttatatttatttactttttgatccagaaataaattatatagataccactattttgtttggatgggggagaaaggatgggtgtgtattcaggaacttatgttacttttttgcaactaataccccttctcagtagtacaaagatttgatttctttttctttctatttcctacagacttcatctgcagagagaaagagacgattacctgtgtggtttgccaaaggaagtgataccagcaagaaattaatggacaaaacgaaaaggggaggtctttttagttaagctggcaattaccagaacaattatgtttcttgctgtattataagaggatagctatattttatttctgaagagtaaggagtagtattttggcttaaaaatcattctaattacaaagttcactgtttattgaagaactggcatcttaaatcagccttccgcaattcatgtagtttctgggtcttctgggagcctacgtgagtacatcacctaacagaatattaaattagacttcctgtaagattgctttaagaaactgttactgtcctgttttctaatctctttattaaaacagtgtatttggaaaatgttatgtgctctgatttgatatagataacagattagtagttacatggtaattatgtgatataaaatattcatatattatcaaaattctgttttgtaaatgtaagaaagcatagttattttacaaattgtttttactgtcttttgaagaagttcttaaatacgttgttaaatggtattagttgaccagggcagtgaaaatgaaaccgcattttgggtgccattaaatagggaaaaaacatgtaaaaaatgtaaaatggagaccaattgcactaggcaagtgtatattttgtattttatatacaatttctattatttttcaagtaataaaacaatgtttttcatactgaatattatatatatattttttagctttcatttacttaattattttaagtacctttatttttccaggatgtcagaatttgattctaatctctcttatgtagcacatgtgacttaatttaaaacctatactgtgacacagagttgggtaaacgatgattatttaactttaagcagttcaccatccatttcaaagcctttgattggcttttttgtaaataaaaataacttgttaagaaacaaatatatctgtcatagaagaactagaaaatccagggaagtgagaaaaatgaaaataaaaatcattcatagttttactagtagctaatcacagtcaacctcttttgtgtatcccaccagacttttttatattcatttgtttttagttaaaatataaaagtctcgtatattcccatttttctgcattgcattaccagaaggtagtggcgcctattaaatatgtgatatgttgttgtccagccatggcttctgcatttgcatgcttttgtgtgtgcatctgcaataccctgtgaatatcctgtgtgatggagtggcaagtacgcacagacacgtctgctgcatgcctaggtacgaggctgtctccaggagaagcacttgtttgattatttgagttgccaattgaatttgctgctttttttcatggcttgccattttcactgaaaagaatgactaatgaaaaacgatgattggttattagatttggatgtttggcagacattttctcaaaattgaactaagttggcctcttcacggaaaacaactggtatttgttgtgccaatgataaaattggagatttctagcaaaatgtataattttggaaaagttgtgttcctccactggaagcttgacagctttccttaacataaagacttctctttctcttcgctttcactactactactactaattcttcttctgattcttcttcttctccttcttccttcttccttccttcctcctcctcctccttcttcttcctcttcctcttcttctttctctctttccttccttcccttcccttccccttccttccttccttccttccttcctccctccctccctccctccctccctccctcctttctttttctttctctttctttctttctttctctctctctctctctttctttctttttctttctctttttctttctttcaagcagtcctcccgcctcagtcccccaaaatagtgggattacaggtgtgagccaccatgcacagccttacataaagccttttctaatgagatggatagtaattaacaaatgtgagtttttgatattatataaagattttttctgtgtttcgaagatccgtataactcagtgaatcagtatgttctggatgactaatatgtgatgttaagaaatcatgactgaggccgggcgcggtggctcacgcctgtaatcccagcactttgggaggccgaggcgggcggatcacgagatcaggagatcgagaccaccctggccaacatggtgaaaccccgtctctactaaaaatacaaaaattagctgggtgtgttggtgcgtgcctataatcccagctactcgggaggctgaggcaggagaatcgcttgaactcaggaggcggagattgcagtgagctgagactgcgccactgcaccccagcctggcgacagagcaagactccgtctcaaaaataaaaaaagaaatcatgactgggtaaaagatctgttcagagtacaagatggaccaatggatttgatatatttgaatataacagagtatgaaaaagtttattgatatagtttcagattacacactgcaactaatctttaagaaactattacttgtccactttttggtaaaatttcagagaacaatgtccaccattatctgaacaggctattaaaatactcttctcttttccaactacgtgcctgtgcaaagtcagatttttttcatatacttcagccaaaacagcatatcaaaatggattgaatgcagaagtagatctgagaatacagccacttttgttaagccagacaatgagatttgcaaaatgtaaacaatgctgctgttctcagtttttaaaaatatgttttttaaaagtatttatgttaatgtgtacttggtttactactgctatttttaaataaaacaagaaacatttttaaatgtctgttttaatttctaaagtggtagtgatagatataacccatattaataaaagctctttggggtcctcagtgatttttttttaagagtatggaagggttctcagacctaagagattgagaaatgctgatgtaatgttttattataaaggtgtaccatgaattatgtaccttacttcatattgttggacattaaagttgctttcagtttttttgttttaaa

SEQ ID NO: 6 - DNA, 142390 bp, Homo sapiens
  gene (1)..(142390): c.IVS28+2T>CiExon28 skipping mutationj
gcaggaacgggggcggggacggcgctggaggggcgggtcgggtaggtctcccggagctgatgtgtactgtgtgcgccggggaggcgccggcttgtactcggcagcgcgggaataaagtttgctgatttggtgtctagcctggatgcctgggttgcaggccctgcttgtggtggcgctccacagtcatccggctgaagaagacctgttggactggatcttctcggggtaaagtgtcttcctattcccgttttcccagctccgtgccccggggtatctatagtgctaggcttctgagacacgtggaggcgcttaggcccgcggagcaggcccctgggctgtgtttgggagattctggaaaaacagactttctcccttttcctttcccctctggagcagctgggaaaggcgtctctcggagcttccgccattcagaaagtgtttccccgcccctgacggccccagcttgatgtttaccttgcgcgcttagttaggattgctctttctagtacggcctttattatggcagaaattgagccactacaggtctgcacagcaaagtcgagggaaataacctgctgtctatgatttagcaagtgatgatggatatttttgagttcaaatcactcagtctttaatggattttcttttctttttttcctagttgaatctcagttgttctcaggctaggtttgatatgaaaaatactactccctattgaagagggtaatataattcttaggatgctaatacaggagtctgtaagtcggagtacttcaggctttttatggttcggtacatttctttttaggggtgggatattgggataagtaggacagttcagatcttgatgtcattgaatagtggtgtctacctaaaaggaagaggctggggcacaaaattataatttaaagtgtttacttcagccaaaatgaggacagctgcccaggactcatttcccagttgccttggggagtgctccttcagccttggttacaagcaggtttttaaaggcgaaggggaagagtgggctgagacaaagttggtcaggaattgttattggtttacagagataccattgcttagtgattggctgtacactgtaactcatagggtatgagttatcgtgtccagcatatggcattttatggcttcttggttccagtctagagcccatatagcaggtgggctttaagagataattatccagctcagaccgggagtgagacgggactgttttttcattctaatgcctctctgggcctgataatttaaaggggcttgcattcttcagctaaaattttattttcttttattttttttcccccacagtggtctccctttattaatccaacaaatgtttattaaggactgctctaggcactagagataccaacaatgaacaaaacagacaaacatctctctccttttggagcttacattttagtggaaagagacaggcaaaaagtaaaattataggatgacagaaggtgaaaatagagattaaaaaggaaagggggatgaagagtgtgtgtgtgtgttgtgggtggggggctgtagggagctgcagttttacaataagtggtcagggacgtcctcgctgagaagggaatttttgagtccagagctcaaggaagtgagagaacttaccttgacgttctctggaggagaagaaagtacaaaggccctgggggaacctgcctctttatgttcagagagcaacttaagaggcctagtgagctggagcagagcggagaggaggtcagaggtcaggccagaaagggaaaggggccagaatgtgtaggactttatgggctatattgaaaattggggctttcattctgagggagatgggaagctgttggagagttgttagggaaacgtgatctgaattatgtttctaaaaaattggagtaagatatcataaaatttgccatcttagtcttttttgtatctggccaattccactcagaattcttttttaaacagctttattgagatataattaatatatcatatgattcactcatttaaagtgtgcaatacaatggtttttagtttgtcttcagagttgtacaacctttatcacaattacctttaggactttttcattacccaaaagagaatctccataaccattagtactcaatcccacccgctttcctagcaatcacttacctatttttttgtctctatatagctctcaaaccctatgatattccttctatctaactgtatttttgtactcattaacagcctctcttcattcccaccacccatccatcccagcctctggtaatcaccattctacttactacctcaatgacatcaaattttttagctcccacatataagtgagaacatgcgatatttgtctttccctgcctggtttatttcacttaacagaatgtcttccagttccattcatgttgctgcaaatgacaggatttcattctttattatggcttaatactattccattgtatatgtatatcacattttctttatccactcatctgttgatggacagttagcttgattccatattctggctattgttgaatagtgctgcaggaaacatggaagtgcagatagctctttgacatactgatttcatttcccttgaatatataccctgtagtggatttgctggacccgcttgtagttctacatttaatattttgagttatttccataatgttagtaataatttacattcccaccaacagcgaggaaggagttcccttttctccacatcctcgccaacacttatcttttgtctttttggtaatagccattctaacaggtgtgaggtgatatctcattgtgattttgatttacatttccctgatggttattgatgagcaatgtttcatatacttgttggttatttgtatatctccttttgagaaatgtctattcaggtcttttgctcattttttaaatatggttttttaatttttttatttttttgctattgagttgtttgacatccttaaacattttggaaattaacctcttattagatgtatagtttgcaaatattttatccgattctgtagattctgtcttcagtctgttgaatttgctgtgcagagaagcattttattttgatgtaatccctttgtctatttttgcttttgttacctttgcttttgaagtcatatccaaaaaatcattgcccagatcagcagtccccaacctttttggtaccaaggactggtttcatcgaagacaatttttccatccacaggagggaggggatggtttcaggatatttcaagcgcattacatttattgtgcactttgtttctattattattacattgtaatatatagtgaaataattatacaattcaccataatgtagaatcactgggagccctgagcttgttttcctgaaacttgagggtcctatctgggagtgatgggagacagtgacagttcataaggcattaggttcttctaaggagcatacaacctagatcccttgcatgcgcaattcacagtaggttttgcgctgctatgagaatctaatgccaccgttgatgtgtcaggaggtggagctcaggtggtaacgtgaggaatggggagcagctgtaaagaaaaatgaagcttcgcttgcttgcctgctgctcacctactgctttgtggcctggttcctaacaggccatggactggtactaatctgtggccctggggttgggaacctctagccctgaccaatgttagggagcttttttcctgtgttttcttcaagtggtttcatggtttggggtcttacatttaagtctttagtccattttgagttgatgctgtatgtggtgagagataattgactactttcattcttttgcatatggttatcagttttcccaacaccgtttattgaagagcctgacctttccccattgtgggttcttggctcttttgtcaaaaatcagttggctataaatatgtggttttatttcttgggtctctgttctgttctattatctgtgtgtctctttatgccagtaccgtgctgttttaattactagagtttagtatattttgaagtcaggtagtgtgatgcccctagctttgttcttttagctcaacattgctttggctattcagagtcttttgtgaggataatgttttcaaggttcacccatgttgtggcatgtatcagaactcgatttctttttatggctgaataatattccatttgtttatattatatatatgccatatttatttattcatatgttgatggacacttaggttgtttccaccttttggctattgtgaataatgctgttattaacattggtgtacaagaatctgtttgagttcctattttcaattcttttgggaatatacctacgtgtggacttactagatcacatggtaagcttttagtttagctttttaaggaactgctaaaactgtttttccatgggagcagtgtacaagtgttccagttctccatatgctcaccaaaacttaatttccttttttaaaaattatagctatcctagtaggtggtgggaagtggtatcttactgtggttttattttgtatttctttaatgactaatgatgttgagcatcttttaatgtgcttattggccattatatgtcttctttgggaactgtctattaagtcctttgcccattttttaattgagtttttttttctgttgaattgtgggagatctttatatattctgaatattaaacccttattgggtgtatgatttgcaaataatttctcccattttgtgggttttcttcactttttgatattgttctttgattcacttttaaatttttatagagtccagtttatctgttttttcttttattacctatgcttttggcatcatacctaattcccaaatccaatgccatgaagattttctgttatgttttcttttaatagttttatagttttactttttctattggagttttaagtaaattcttgtatattagtgtgatacattttaagttatttttgtatatggtgtgaggtaggggtccaacttcactcttttccatatggagatccagttgtcccagcaccacatgtttaagagtctattctttccccactgaatggacttggcacccttgtcaaaaatcaattggtggtaaatgtatggatttactcctggaatctcaattctattctattgtatttatatttctgtccttatgcctgtaccacactgttttgattacagtagctttgtagtaagtttagaaattgggaaacatgagtcctccaactttgttcttcttttcaagattattttggctatttggggtcccttgcaattctgatgagtttgaggatcaccttttccatttctgcagaaaagccttttgatagggattgcattgaatctgtagataactttgggtagtattgacatcttaacaatattaagtctttctatgcataaacatgggatatctttccatttatttgtgttttctttaatttctttcagcagcattctgtagttttcagagtacacgtttttcacctccttggttaaatttattccttggtattttattcttttagctgctattgtaaatgcagttactttcttagtttcctttcagattgttcatttctggtgtataacaacagctgatatttcaacgttgatgttgtactctgaaactttgttgaatttacttattagatctagtagctttctttgagatttttatatgggattatgtcatctgtatatagagatagttttacttcttcctttccattatggatgccttttatttcttttccatgtctaatttctctggctagaactttcaatatgatgttgaaaagcagtggtgaaagtgggtatctttgtcttgcttcctatcttaggtggaaagctttcagtctttcaccattaagtatggtgttagctgtgggttttcataaatgccctttatcatgttgaggaaatacccttttattcctagttttctgagtttttatcatgaaagggtgttggattttgtcaaatgccttttctgtgtcaattgaaatgatcatgtatttttcctcccttatcttaatgtaatgtgttatattgattaattttcttatgttgaaccacccttgcctttctggggtaaatttcagtcacttatgttatatagtcctttaaattgtgttatcttataacagaatcactctgctactgttttgagcataggccatagggaaaagcaggtaaaaggtaatatggcttgaaccaacattgtagcagcggaagtggtgagaggaggtcgaattttggctttgttttgaagatagaaccaacagtatttgctgacagattagatgcagaatgtgaaaggaggagatgagtcaggatgaatccaaggcttttggcatgagcaaccagaaagatgaaggtgacttactaagatgggaaatatacaaaaggagcagtttggggaaactttatatctattgagtggaatatgccaattagagattcaaatatccagtaaataattggctatcaaagtttgaagttaagaggaatggtctaggctgtttatataactttggaagtcattagtgtataacagctaatttaaaagccagcagactctaagggagtgagtgtagagggagaagagtagaggtctgtgacttgaatcctggaatgctgtgatgtttagagattggggaggtaagaaggagcagcagagtatactgaaaagggattgttatactgaaaagggattgatatagatggagactcaagaattatcacagaaacctgataaaatgtttcaagaagatgggtgtgattaattgtgtcacttactgccggtacattgactcagatgagcgttgagaattggctataggatttgacaacataaaagtcattggaaaccttgacatgagcccttttcgtggagtggagtggttacagtgggtttaagagaggattaaaggagtggaaacagagatgctattatagatgactcgtttgagtagttttcctacaaaggggagaataataatggagcagttagccaaaagttgagtttttttttcttcttcttttttttagttggaaaaaattgcgtatatgttgatgggtcttttctggcagaccagtagagaggaaaaagttgatgatgtaggagatgggaaaatgtctttgagtagatgtcttcgagaaaatgtctttgagtagatgagaggtttgcacacatggagaggttggatgtaggagtactgatagttcatccatagttacataagaaaaggtagatgtattagagttctcctgagaaacagaaccaatgggagatctttatatctctgtgtccatctctatctgtatttctgtctctgtatctatgaagagattataaaagttttaagatctgccaggagacatacccacgggagctaatggtatagttccaggccagttgtgaaggcctgagaaccaggagagcctatggtgtaagttccagtctgagtccaagtctgaaggcaggagaagaccaatgtcccagctcaaagacaggcagagggagcagatcttcccttacttagcctttttatttattcaggccttcaacaaattgaaggcccacccacattagggagggcaatctgctttactcagtctactgaatcaaatgttagtctcacccagaaacatcctcacagacacacccagaataatggttagccaaatatctgggcaccccatggcccactcaaattgacacataaaattaaccaccacagtagagtatatgggtacaaatataattatgtgatatagatttcagggtaagagcctgtggaaattcatttttgattgcttctagtgaaatcggaagcaagatcatcagctaagagtgacgatcggtggaggagatatgaagtttaagtggagaggagaaggtataaaatagtcttaggaggggaggatagtaaatagattagggaaaagttgtaggattgccaggaagtagtaagggcccacttgaggctggtggtcacaaatttaaggtgagaccagtcaaaatggttgtgcttttcacctgctgcattcattcagctgcataggtacaggcacagagtaggtcaagagttcttttttattcggggttagagttttgccaggagatagtaataaagccagaagggcaatgaatttgagggagtatgcaaggaagtggctgttaacttggagtttaaactagtcaagaagagaattaaggactgcccaaggggtgaggacaatgatatggtagcagggcccttaaaagccccagttagatgaaaagattgttggaattgagtttctagagggaatgaacttgaaaaacaggaggtgttggttggagagtgggatatatggaattgagattatggaaggattcagtcgttggtaataacatagtatctttgtaggaataaataggtggagcaggatgcagacaagatcactggaggagggctggtcagaagactgggaggcactatctcccttggatattatacatcaaagcttgtgatctactagacaagtagtggggaaagggtaggatatagatattaatggctatagttttgatggtgatggtcatggtgatgatgatggtccattaacactcaactcaaataccatcaatttgatttatatctaacaccacaaagttaggtgttgagttacatgtggttatattgtaactaatagtcagcccttcatggacttctattctttgatgagactcttcttgtaggagtagtaggtgccttaaagcaccttttcatagttgtcagattgaaatccttcaccagtgttttaggttaaccctgttactgtggaagtttctcttggctttctgtgtgggctgcttctttgtctagttttaccttttggggttagcatactattgtgaataatttattggtgagaaggtaagcagagaagtagagtactctatgacctagtaatttcatatctaggaatctatcctatagaaatgataggaatgccttacaatacccacatatccacaagggtattcattgaacgttatttttggtgaaattcgcaagcaacctaattatcatcaatagggaattgttaaattatgatagataaaatggaattctattcagtcttcaaaaagtcagatcaagaagtggtcttacattttaattatcccatcctgtcaacaagagtgtcttcagttgcaagtaatggaaaaaccattcaaactgacttcagcaataaaaggttatttattggtctgtttcatggagacatctgaggtagagtggccttcaggcaagttcactcagggatccgactatttttctggccttattcttggccctcttctatgaaaacaccttcagggtggtttcttgtatgcttgtaagatggctacttgcatcaaccatgaccacatctagcaggagcaaaagcatcctttcccgtaccagaggagagtcccgaaatttgttgcaattggactgccttggaagcaataattatggccaggagatggaggctagagaactgagacctgatcatagctcctatccttgaatcagttgtatagcaaggggaattggattttccttaagacagttggatttcacctgtagtcttggtgatgaggtcagttccatccataaaactttgctgttacacattttgggatggggtgaggagggctgaatggagattaggatgctattgaaatttgctgtacacaatggatcattatcgtcttctttcttagtgttaaggtaatcagcctctttttcctcctcctatgcttgactttactaaaaccatgagacatgtttaacctcaggactccaatttgaaaaaatatagactgttatttactttattacttacagaagcccttcatactactctcagcaagaaagaggtaggcagggagtgagggaggggggatcatgcttactgagaaacaaactatcgagtattgaaactcccccttcatatgcctgacctcagtcccattcagttaccagtaggggcccctattaattggtacctcaccagcttttgctgttcgttcataaaactgagtcattgaagtacagtagaaaaataattggactacaagataacttatttccttccataattgcaaaatatctgatttttcttcttgtttgtattatgtaaacttaccctgtctgagggtcctcctggattgttctttgcatttatatatacatagaatttcattttcttttttcttgttttttttttagacggagtctcactctgtcgcccaggctggagtgcagtggcacaatctcggctcactgcaagctccgcctcccaggttcacgccattctcctgcctcagcctccccagcagctgggactacaggtgcacgccgccacacccggctaattttttgtgtttttagtagagacggggtttcaccatgatagccaggatggtctcaatctcctgaccttgttatctgcccgccttggcttcccaaagtgctaggattacaggcgtgagccgcttgcccgaccttcttttttttttttttttttttttttgagacgttgagatagagtctcactctgttgcccaggctggagtgcaatggcacgttttcagctcactgcaacctccacctcccaggttcaagcgattctcctgcctcagcctcctgagtagctgggattacaggcgcccgccaccatgctctgctaatttttgtatttttattagagatggggttttaccatggtggtcaggctggtctcgaactcttgactacgtgatccgcctgcctcggcctcccaaagttctgggattataggcgtgagccactgtgcccggccaatttcattttctattttgaaatttaaactaccactgacacttcgttttccctctgttttacttagcatttatcttagagaataatcttaatatgtatagttctattttattcttttactggcagcttagtatgccatattttggatgtgtcattgtttatttacctattaatttaccctataactgcttcccatatttttgcttttacaaagggatgtaatgaacatcctttacatacgtctttgtgcatatgtgcaaatatttccataggatagatgtaattactgacttgaaggttatgcagatttaaaattttgatgccttctatgaaacatctttcaaaatggtgatgccagtttcttctctcgtaattactgcatatggtcaatcttttaaatttttgctggtaatgatatttcaaaattataaccagttttttggcctcatttcttgaataacttgttttttctcaaagataagaaatgtctccttcatcgtatgtcaaatttccatatttacatggatctatttctggacatggcaagttttatttatttattgtatgtatttacggtgtacaacatgatgttttgatacacatatacgtagtgaaatgattcctacagtcaaacaaattaacatgttcaccaccttccatagtctctgcagtcttcaaggttttctctatatgggattagacatgctatgtctgatctgtttttgtatttttacaccaattccacactaattttttttttttttttgactgggagtctcgttcttattgcccaggctggagtgcaatggcatgatctctgctcactgcaacctccgcctcccaggttcaagcaattctcctgcctcagcctccctagtagatgggattacagcactcgctgccacacctggctaatttttgtatttttagtagagatggggtttcaccatgttggccaggctggtctcgaactcctgacctcaggtgatctgcccgcctcggcctccgaaagtgctgggattacaggtgtgagccacctcacctggcacacactattttaattactgtagttttaaaagtttcatatttagtagggtgagtttttccttgttggtcttgtttttcaaaaaaaatttgctgctcttgagtattttctcttcccagtgaactttaatgtaaactcacgtggttcaatgaaaaattctgatgactttttttcttggtattgcttcttgagtgtattgatttaattaatatatttacagttttgggtctggctgtgccgaaacgcagtgtgtcttatccagtccttttttaactgtcttaataaaatttgctggttatctttaaaatggatcttgtatattttatgttaggtttattcccaggcaggttgtcatttttgctgttactgattttggatataaattttggatataattgtataatttggacttggatataattgtatttgattctgtcttatatataaaaatgagataggataataatttatcctaggataaaaataatttgagtatccttattttgcatctggtaccttacttgctcctgttaaacaaatagataaaattacttgtcttcaaagagatcctgtggaaaaattatttattttaggagactttggagctttgataaaaattaggcttatcttttgtaaaagctggttagtgatagcaatcagactcttttaaaggtgatttttttttctttcctttgataaaatgcttaatatgagggaggattaagaaagaggatggcttttgaacagtttcttcatggggaaataagaaattagaataatttcatgttctccaaaaaaaggagaaaaatgaccttccctcctgagcctacttcaagcctctgtttctttctgactctattgttctcatctctgcatttttccaatctcttctactgttagtgttttaggctagctcctcagtggagggcagaaattcaccttctctttagctgtctttgaaaccaagaagatagaggtatgagatcttcgtagtctgtagtaagaataatagaagccatcagaaaaaaatatcaaagctttgtagctgctcctggaagttttgatgtgaagcaggagacatcacctattggtacctgacttgcttttgctgttcattcataaaacagagtctctgaaatacagtagaaaaataattagactggaggataacttttttccttccaggaattacacaatcacaaaattgctgatttttcttcttattcatgttacataaacttatcctgtccgaaaagactgtatttgaacttactatgtaagatttgctttaggtaaatttatggctgcttccagaattgtgtattaattttccagtttcttttttaccagtctccacttttacctttccctcttccccctatacttaaattggtcttactgtaaaatttatgcgtttctctttctacctggcaatgctgattttttttttttttttttttttgaggcaaggtctcactctttcacccaggctatagtgcagtggcaagatcgtggctcactgcaacctcgaatccctgggctcaagcgatcctcccacctcagtctcccaagtagctgggactacagatgtgtgccatcgcacctggctcatttttgtattttttgtagagatagtattcgccatgttgcctaggctggactcaagccagcctcctgccttagcctcccaaagtgctgggattgctggcacgtaccactacatccagccagggctgagtttctgaatcatcattgcagcaagagaaattggattacctttagaccactggctctactgtgggctgggagtgggacaccttccttaaagcgcattggacattggctttgtgggtaactgatctttacctgaatgaaatttatcagtactgtattaagggtctagggtggaacggatgctagcaaggcaaccgttaacatccacttactgatgaatcctataaaattttatttcaggccatacgaagtaacagtaataaatataaaaggaaaaatagacaacctaagcaactttttaaattgacttacttgaaaactttccctgcaatttcccggtttataatggttgatttcagctgactggctatagctacttagagaacagaggaaattcattaaaaataatgaattattcagttgggtagtgaaatccagttataaagcacttcgctgtgccatggattcagttcaggtcaagtgatgttcctggtttatgggcagtgtggcttctcactatgacacagcaaagaacgtagcttttatcctttacccttgttactaactaaaattaatggcattttattgtgtttatttgtttgattccatttacagtttatttcacttggttttattagtacaaaattgtgctttatataatatttgacagttaggaaaaattgttagatacctataaagaaacaagtctctcaaaaatcatcctactacttttaaaaattacatcgtcttactacagttaacctagatgtgaatgggtagttttatttagcttttctggtttgtttgcttggtctgtttggagggaagttaagattagcagaaatgtagtaatagattcatgaaagtcttgaaagcttctttaattagagaatttaatgagggctttggcatgcattctttggtttttctctgttttcctctaccccttcttattctttttggttcattgaaaagtagaaagaaattctcaaaaaccgtacaggagaataccttataaatgatatcttctgcaataaactatagattgtatatatgtatatgtatctagatacacaatctgtgtgtgtgtatatatatgcttgtgtgtgtataaatgtataaattagttactagtatatacgtaagtataaaacctcaatgtgcaaggttacattttcagaaaatatgtaatataataaaagaaatcaagcccagaatttttaaaaagtttattgcgctttctgttaaaaatgaaaggctttttgactggaagctgcttctcagtaaaaataacataattgtgttggtgaagcccaaagattctaatgaaaattagggtattgacaaccaaacggaattgctggagtacttaagctgctttggttttgtaatctttctgtgtcagaatatttgaaaaacacttattaatccagtcttgtaacttatccttgaaatctcttttttaatattcttttccacacacatgaaaagttagatgagtgtatgaatttctgttgtcagactagttgtaaacctcctaaatatagtttctgcagtatagttaaagagaaagaacatcctggctaacacggtgaaaccctgtctctactaaaaaaaaaatacagaaaatgagccgggcatggtggtgggtgcctgtagtcccagctactccggaggctgaggcaggagaatggcgtgaactcaggaggcagagcttgcagtgagccgagatcacgccattgcactccagcctgggcgacagtgcgagactctgtctcaaaaaaaaaaaaaaaaaaaaaaaaaaagaaagaaaataggcccagcaaggtagctcacgcctgtaatctcagcacattgggaggctgaggtagggaggattgcttgaggccaggagttcaagaccagcctgggcaacatggtgaaactccatttctacaaaaaatacaaaaattagctgggcatggtggcatgtgcctgtagtcccagctacttgggaggctgagtgggaggattgcttaagcctggggaggttgaggctgcagtgagctgtgactgagcaacagagctagactctgtctcaaaaaaaaaaaaaaaagagatgggttttgaaattcagtactttttttgagtgaggtccaatgggtcagaaagaagcattggataaatgaatccattttctcttctctgtttgaatttgtaatttgaaagaatattctacctataaagtacttcagtgcttaattagctgtcagtgaatttatatatcttatctaattcatatggatttgctatttttatctgtacctacagattcctgacctctctaaggggatcccagtatactatagggaatgaggtataatagaagtaaaagacctatcactagtcctgtcatcattccaactcatgtgtaattatagtttaaaagaagtgacatcatgtgtattgctgtttatctttacattaatcttgtggtcaagaaagcaaatactataatatataataattatataatatcataagacaagtaatataataatgggaatataatcccattttacaaatgaggaaatgaaaatttagagaaataaagtgacttgtccagggtcacatggatactaagtgaccaagtgtcaaagcagaattttccaaataacttaaagataattcttgtacaaatatagaacgaacacatgtcatatgtgttgtgttaatgagggaaccagaaggatgacaacattggttcagagagatgcaaagataaatatagacattggaggaaaaagttggaaataagattgttaggttagatacaaagctgtgttataggccaataaaaaccatagactttgaggttatcttttttactggacaggattcagttacacctttatgagaccaaaatttattatttaacatgtggatattagagtctgagttttaaaattattagtaaatgaccgtcaaataaagatatgtcccctaatgaaatactgataatcgctgggtgagcttgtgctcctatatgacattgaaatgacatactgccctctctttgtcttctaagttttggatacttttttttttttttttttgacacaaagctgcattagaacctaggtttcttgattttcagtccagatttctttccactctacttcctgcttcttcatagtataattttcaacactagagcagtctgcataacttttgcaaaatcagctagtctttcttattagttttcctttgtgcaaagtgatgtagatacagctttcttcttcagagaaacattgtgaaattcaatgaatatttgtaaaatttgcatacgtgcccaatgtgagaaattgaaattattacttaagtattgcaactgttcttttaggatattttgtttgcaaatttcagagtaattataaatattcttgcatttttattgtaatcagtatttataaaacagtgtatttcatcacattaacctttacatattttgaataaaatagtattgaaccattttaaatagtaagtggaaatttttccacattaaacagtataacgggctaacagagttaagcattgcattatttaactaataattttttcctgaacttcagattattatctgtatgtgtcatataacttgacaattttttttttttagtgctttttaaaaagagtgggatactttattcagtttagccctcaagcaattaggcaagtcagttaccatggtaacagtaggtattaatttccttacctagttagaggttttatgaacaaagaaatctctgagttcatccaccaaaacccaactttctcttgagactggcctcttgagactggtgttaaatttgtctattttctagaagatgacactattctaagtggaaaatacggttctcttgaggtgaatttctactctatcaagagtgaagtagagtatggcttaaaagttaagtgattaaaaagctaccctttcttagctaatttggaatgtaattggtcttaatttttctaaattcgttctaaccaaaatcttattggcgtgatttctattgacatgaactagaagtgacttcagcagacaacttgtcccaatatctaaatgctgtcaaatagaatcacttaagatgaatttcttccaaaacagagttcacaattttgacagataatctcttagcatttaattgactagtattaccaaccttatggaataggtccactcgtttagctatcatgaggaccattttgcaactaacttatcaaaaagccttcaccaagaagttgcatatcttattgatattttagaatgcgattatggagattaaaaatcaccacaatgggttgttaataacgccagccttgaactttcagttttagagcattttatctgtgttctgtagtcaaagttggtaaggtgtccagtgggtcatgtttgacttgctgcttgtttttgtactgtgtgctaaatggtttctacatttttcagtggttgaaaagtcaaaagaagaataatattttatgaaatttaaataaatccaggtttcagtgtctataggtaaaatttcattgtaacgttgttatgcttaagtattgtttatgacttctttgctatagtgacaaacttgagtagttttgacaaagatcatctggcctgtaaggcctagaatagttactgtctaaccctttagagaaaaaaattgctggcccttgttctatagtatgaaaaaatatagccttgattattcattaaaaaattattttcccattttattgacatacttttgtcccctgattgttaaaaggaatgcatgttcttatagaaaagttggaatatatagaaaagtataaagaacaatatgaaaaaccatttgcaattgtgagataaccactaatgttttggtatacattgctccagacttacacacaaacacacacgcgtatttattttatacaattagagtctaattttttttttgagacagtcttgctctgttgcccagggtggagtgcagtggcaagatttcagctcactgcaacctctgcctcctgggctcaagtgattcttgtgcctcagcctcttgagtaactgggattacaggcgtgcaccaccatgtccagctaatttttgtatttttagtagagacggggtttcgccatatgcccaggctggtctcgaacccctggcctcaaatcatcggcctgccttggcctcccaaagtactgggattacacacgtgagccactgcgccttaattttttaatttgcttttttcacttgaataattataagaacattatttttaatgactgtgtagtgttctgttttatggatgtaccatacttaattatttagtcataatttattattatgaggttgataaacatgataatcagattgagctcaagaagctagttatagggttgcacaattaatgaatcccaggtacctcgctgggttgctgaggctgctatttttttcctgcctgtttggaacactgtgtttgggaccaatgaggcaaaagaaattgaagagctgccattttcaattattctattagaagatacattgaagatttgtcaaatgacatagacacaacactaatccagaagattatttaatcaaaaaggcattcatttcagatatgaattcataaacatttgtaacgatcctcagtttgaagaccatatagaatccctgaagaactggaagacactatttgcttggcaaagagaagtccccagaccaactggggatgaaatattcaaagagataaatgaatactttgaaacatacaaggtactatggaaaaagagtggaagtttgggacaggtaatgacaggaagatataaaagctttacattaagttcaatctaaaactttattccaagtaacaggttgtcttattcatggagaagcagttgtaaattaaaacttgcctgtggtttggaatttcacattaaatgattacattaaaaattcaaatggtgaacctaactaaatccaagctcctacagtaccttcttttcacctttaggtgaagaaatgcggtgagctattttattactgattatgtggacagtccaaaggaaggttcataagcgaaaaggaaaaatttaaattattccatgtgagcgattcttactttgcagatttgttgaagtgtagttactggcttcaaaaagtggtatccttaactgacattttgaacacttgaattcactcaataaaaaaatgcagtgatcatgtggaaaatacattaaggtatatgacagagtttatggattcagagcaaaaattcagctttggaaaagtgaagttaaaatggttttttaagtgatgtttaattggtgttatttgaatcctaaagaagaattaatagtactagtagaggaaagtcagtgtgtctgtgacaaagctttagtattattttgaaatacttgatataaaaaagttcacgtttactcaaagcttacttaaatcatcagaataaattaacatgtttcttaattaaagaaaaggagaagctattagacttaaaaaatttttgcacccttgaaatacatacaatttgaagagattaagttgttggaatactggttaatggtgaaaaaggagttttcagtctatgaaagcaaagccttctcctttgccatttgcttttttgtagtggttgctatgtagaattcgaagaaaatattgttaaaaagtcttggtcaggagtagagtgtagcatgaacccaatgcattttaacgttaataatgaggaaaaagggaatgcatgataatttcatcaagtcagaaaaaaatggaaaaagaaaaagaggaaactgaagaaagtaactgatgaaagtaaggtgaaagggaaaacaactttttataccacctgtgaatgagattaattttcgtttccatactgaaagacaaatatattccaattaagccattcaaaataaaaaacaatttttttttggtaagagatgggatctcactatgttgaccaagttagtcttgaactcctgccctcaatcagtcctcctgcttcagcctcccaaagtgctaggatttcaggcatgagccactgtgcctggccaaaaccaaaattaagcaacaaaacaacaacaacaaaaattccagacagcctttaaaataatgataaaggttgaaaaattgtagatagtggtaggtagataagatttcaggaaaagtccaaagcaaatcataatacgttattttaaaggggggtttaaaatcctttaaaggtacaatgtgaagcattatgaaatgataaaatacatgttttttaaaaacattaattttattttaagttccaggatacatgtgcaggacgtgcaggtttgctacataggtaaatgtgtgccatggtggtttgctgcacctatcaatctgtcacctacatattaagccccgcatacattagctgtttttcctgatgctgtccctcctccaggacccagtgtgtgttgttccccatgtattctcatcgttcggctcccacttataagtgagaacatgtggtatttggttttctgttcctttgttagtttgctgaggataatggattccagttccatccatgtccctgcaaagtacatgatcgtgttcctttttatggctgcatagtattccattttatatgtaccacattttctttatctagtctatcattgatgggcatttggtttttttccatgtctttgctattgtgaatagtgctgcagtgaacatgaacatgtgtgtgcttgtatctttataataaaatgatttatattcctttgggtatatacccagtaatataattgtataacccagtaataggattgcagtgtcaaatggtatttctggttctaggtctttgaggaatcgccacactgtcttccacaatggttgaactagtttacattcccaccaacagtgtaaaagcattcctatttctccatagccttgccagcacctgttgtttcttgattttttaataaacgccattctgactggcatgagagggtatatcattgtggttttgatttgtatacaaaaaagatttgtatttctctactgatcagtgatgttgagctttttttcatgtttgatggttgcataaatgtctttttttgagaagtgtctgttcatgtcctctgcctactttttaatgggattgtttgttttttttttcttgtaaatttgtttgagttccttgtagattctggatatagacctttgtcagctggatagattgcaaaaattttctcccattctgtaggttgtctgttcactctgatttgctgtgcagaagctaaaagacatgattttagaaaaagacatgtcaaagtcatacatgctcaacgacatagcgagtacatatgtaaataaaaaattattttatgctgtgaatttgaccgaaaataacctttacctcgtcaggaattacaatcctcacgtatggtaaaggatttccctattgcaaattattccacaacattaatgttctgtgtgctttttatctatcccaagatacaagtaaatttgacaaagatattaggtttgtaaacaaatttacgttcaaatctttgcctggaagtatctagatagaattttgcatgcaaaagagtatttacatctaaaaaattacatatttcaaattaaaatgattttagtgttatagatagaaggaaagagttattgaagtttatttctgttttggcagtgtaaatgaattacttacaaaattttagaagtctacaggtgtttttataaagtttgtgttatttgtggaaacctcagttttctggcattttgccaatgaggtctactctaagtatagcagaaatttgttttccagctttataaatatatattttaagattaagaactgattttacttatataatctgggatcaacttttggcttctcctgtcaaggattttgaatttgtgacaaaatatacacttattgataaccagtgacatatataaaatgctttacaattaataaagcatatgtattttacatattttttcactacatatgacgcatgtggcaaccccaagagttgagttgtacccatcggcaaactttgatcatgattctgtgaatataggcaagcaccaattgcaggtagaacattctttttttgagtcccaaaccgtgagaaacaaattacagaaatgtacctttcttttgcattaggacacgttgtagttttgtatgaacactctagttttaagcagtatgtgcaaaaacattgcacaaaggatttgtgtgttgattttgggactcctgtattattaattatgtggtttatttgactaccccacattttcaagcataaattaataaatccataattccaggcttattaacaataaacaatctagatagttgaactctttcttgctaacattttctagatatggactgtttggtatttttctactaataaagacccttagtaagctgccttctggtttgatgtcattgggatgtttactgggaactttggtggagatcttgcagtctctctcccccagtggtgaaagaatgagttacaaaccagctttccttcccagtgtacaatagcgatggagtttgttctatatggaaaatttgtttgataaaagtattctttaaaattttttgttccataaattatcagtattttcagtttctgattcatgcttgggatagttgctgcatattgtttaattttgtcagaatttatattgttaaatatcaaatacgacagactaccctcaaatcataagtagttaatgtaattaacatcctgtttcatcatgagactcttcagtgttacattaaaaactgctacctcctgggccgggcgtggtggctcatgcctgtaatcccagcactttgggaggctgaggtgggcgatcggatcacgaggtcaggagattgagaccatcctggctaacatggtgaaaccccgtcgctactaaaacatgcaaaaaattagccgggcttggtggcgggcgcctgtagtcccagctactcaggaggctgaggcaggagaatggcatgaacccaggaggcagatcttgcagagagctgagatcgtgccactgcactccagcctgggcgacacagcaagactccgtctcaaaacaaaaaacaaaaaacaaaaaaactgctacctccttattacaaataggaactaaagttgaagtttgaggaatttgctaagaactaagccttgaactaaggctattttatttgagtatgagtcatatcagggtacggatccattttactattaacaaaacaaatatgttctgttttttttttttaaatgcacacaccacgtttgagagattcttattcactgtattttctttaattatacttgaattttggtttacattgaggagtgccctcaaagatattaacagatttttaaaaaatcctctaaaaaactcattcttagggaaatttgttcacttactaggtgaggagcaaaataaaaatccttaatatagaagagctattatctgtcttcaaaattaagtctttgagtagatttgtgaataaatctaatagttttgctgaatttacttagatcttaagacagaataatcatgtagaaaatttaaaatgtcaggaattcataatgattcatatacccaaggattttcattgatagtgaggtaaggttattcttgagaaagactcaaagtcataaaataatagaatttcgaaactaccagaattatacaagtcaattaaaatgactgatttgttttaagaggaagaaatactaaatgtataattattagatgcagcatattgtatctgttttgttttgtgattctagctcttataacctatgcttggacctaggtgtcataacttactttaaatatgtatgtttggttttcattcatattgacagtactacctctcagttttctttcagatattgttttgtatttacccatgaagacattgttttttggactctgcaaataggacatttcaaagatgagtgaaaaaaaattggaaacaactgcacagcagcggaaatgtcctgaatggatgaatgtgcagaataaaagatgtgctgtagaagaaagaaaggtatgttgttcattgactattcttttgggtgagaaatttaatttatatttgactgtgcaaagagtcagttgttacttgtaaacttcaagtcattgtttaggtcagagttgctgttgtctaaatgcaccaggacctagttgttgaaagggtaaactggaataaactttaattgggtttacaaaatgagaattcttactgtatattttctctttttcgggttgactttaccagtttgttctagttcagataatttagacaacattaactttgttgaattttttgtttgccagccggtcttcagcattttaaggcaacattattattacagttgtaatacgaatataattaccagagaaaaaactcaggaaaataaatgcttttatgaaaatgggattagaggtttgaaaataaacttgttaggagaaataatttcacaatgggatggttttttctttgttaagttttctttatgacttcattagtttataaaacattaattgataaaacttagaactataaattgaatgcttcagtgaactttattatttcagtgaacatttgttatttgatgtgaactttgtgcctgttttgaaatttactaaactcaaggcatgtgttcggaagagtgtttttgaagatgacctccccttcttagaattcactggatccattgtgtatagttacgatgctagtgattgctctttcctgtcagaagatattaggtaagtgatttgaatttcctgattttatttgaatttggacccttagaaggtactattatggtaatgtttgtgaatatactgagttttacaggtgaggtgtgttcaatagataattatttctatgtatacactatcaccaagttttacatttcaaataaaagtcactgaattaatttgtaatctgtcagtttgttcattcataagcttttctattacttcagacagtttttttttaacttttttaatatatgtgctgctgaagcgagcacgacagttttttaactttcagtacttaagatgttatatatagagctactgaacatactgtgtttattttaccaatttagggaaaaagtgcaaaaattatttaacctttaaatgcacctttatatttcattaaaaatatcaacatagtaatattgaataatggctatgatcggctctgttgtgtgtaattagtaacagttgtagcaaatgatccttaaaaaatgttctaactaaacattagaggccaggcgcggtggctcaggcctgtaatcccagcactttgtgaggccgaggcaggtggatcacaaggtcaggagattgagaccatcccggctaacatggtgaaacaccgtctctactaaaaatacaaaaaattagccaggtgtggtggcgtgcgcctgtagtctcagctactcaggaggctgaagcaggagaatcgcttgaacctgggaggcagaggttgcggtgagccaagattgcatcactgcactccagcctgggcgacagagtgaggctccgtctcaaaaaaaaaaaatccaaaaaaacaaccccacaaacaaacaaaaaacattagaaatgtctgttagtacttttaaaggttgccttgtaaaattaggactgcaatagtgcaatctaaggctctcaaagcataaaacaagtaataaggaattcattcagatattttccgaggtggttatacctgtcttttaaaaaaaaaattttgttatatattgggttaaaaaaagcagaggtgctgggcacagtggctcatgcctataacccctacactttgggaggccaaggcaggaggattgcttgagcccaggagtttgagaccagccatagtaagacccccatctctacaaaaaaatttaaaaattagccaggtgtctgtggtcccagctactcaggaggcctaggttttgggcccgagaggttgaggctgcagtgagccttgatcacaccattgcactccagcctgggcaacagggcaaaaccctgtctcaaacagacaaacaaacaaacaaaaggcagaggtaggttaagctatttattaatggtcttctactggtatagatataagctagaaataacattcaagtgtttttacttttactacagttatctggccactttgggactcattatactgaattagtttcacagaggaggtaaaatctgttgtttatgattacatattaactctaccattttaccttcagcattgctgtagtatgtcatatctgaaggcaattagcacaagtgacttgaagaattgtagttttgatgacttatatgtattttataaaaggcaggcagagtttttgtgtttgctttcccctcctctggacactttaaatttttgctaccacaggtttccaacaatttgattatgatgtgcccttgtgtaatgtggttggtgtttatttggcttggagttcgttgaatttttttgatctgtgtgggcttatacctttaatcaaatttgaaaaatgtcttcagatcctttttcctcccatcctgttattcttttctctttctgggactcttagtacacacaagtttgattgcttgatactgtgtcacaggccactgaggctctttcctttcagtcttttcttctttcttcctttttttctttctgtgcttcattttgaatagcttgaatagttttgtttcctgtcttcaagttcacttatatttttttcttctgtagtgtctggtctgtttataccatcctgtgaatttcttttttagatactacatattttgtttatctctagaagtcccatttggttcttaatttttttttccattttggctctcattattcatgtttctttcaaaattcttgaacatatttagcatatttttaatagctgttttaatgtacttgtctgttaattccattattctagggtttttttctttctattggatgatttttctcctgattatgggttatattttcctgtttattcctacagctgttaatttttttttttttaattaggcattgtgatcttactttgtggaatgttagattttattgttttcctttaaagaaaggaactttgtcagacatctaagttacctgaagatcaactttatgttttgaagcttgttttcaagcttgatcagggaaagtctacgtttgcctttagtctaaaggtaatttagccctataataagatgtgacccttctggagtctttgtagactgcctctggtgatcaacgatctcttctctgacttttcagaacgttaatgcctcttacctttgtgtaagtccgtcctaagaatcattcagcttatggttgtttgcccagccccatagagttttagtctatgcatgcttgtcttcgtattctgcaaagaccaaaggagtcccttagggagatttctggagctcttttcctgcctagcttcctcctctccagaactctgccccgtgagttccaggtccttcagcttccagggctctgaactctgtctccccaactcagtgctctccttgggattcttctccctgttctgttgtctgcaatgggtcccaggaagaatgtggggcaactgtaaggttcacccttcatttcccttcccttagagatcatagtcctgtactgcctgttgtctagtatctgaaacagttgttttatatgttttgtccaagtttagatttgtttgtggtgggagggtgagtctggcctcccttgttatatcatgttggcctgaagcagaagctgagtttcttttattttttaaatatagtttcaatttttaacaactattaaataggcaagtatcaacaacaatagataacaatataatagatatgcatattcctcccactttatcaaatcttaattttcttcaatttttttttttttttttaatagggtctcactctgttgctcgtgctggagtgacagtggtgtgatcttggttcgctgcaacctccgcctcttgggctcaagtgatcctcctgcctcagcctcctgagtagctgggactacaggcatgcaccatcatgcccagataatttatatatatatttttttatagagatggggtttttgccatgttgcccaggcggtctcaaattcctggactcaagcaatctgcctgccttggccccccaaagtgctgggattacaggcgtgaaccactgcgcctggcctgttttcttcagttctttattaagaaatgaaacagtaaaatacagctgaagccccgtgtttgttctttctgattctccctctgtgcccctctgagataacttctatgagttttgtgcatttttttttctttttaataaaaacagggtcttgctctgttatccaggctggagtgcggtggcgagatcatactcaatgcagcctcaaccttatgggctcgagtgatcctttcgcctcagcctctcaagtagctacaactactggtgtgtgctgccatgcctggctaattttttatttatagtttttaaagacagggtctcactatgttgcccaggctagttttgaactcctggcttctagtgatcctcctgccttggtctcttacttaaagcactgggattacaggtgtgagccactggctgctcacatgttttttataatagtacttaataattttatgtctgaaaatattatataatgttattttgcccatttaaaaactttaaaaaatgctaacaaactgtgtactctgtaacttgtcttttttactcaacactacgtttttgagaatttttcttgttgatctgtgtagttccattttaactgttatatcttactatgtttcattatgcaacagttggttcaatccattctcttgttaatggaaatttagtttgtttctaatttttgccagtaggaacagtgttgcaatgcatattcttaaacatgtctgtacacatctgagggtttcatttatttgtgacaaaacttgccaggtcatagtgtttatgcaccttcaactagatattgtcgttgtcaaagtttttttccaaaaggattttaccaatttatacatgaaccaccgatagatatcctcttaacacgtggtattctgaaacttaatttttaccaatcagatagatgtgaaatcacgtagacttagtttgcatttctttgacttctagtgagaagtagtgtcttcacatattttttggatttttaaaatttattttttatttttgtttttcttagagacagggtcttgaacttttacccaggctgaagtgcagtgatgcgatcatagctcacgctaacctcgaactcctggactcaagtgatcctcctgcctcagcttcctgagtagctgggactacaggtgtgtgccaccaagcccagctaatttttaatttttttttttgtagagacatgctgtgttgcacaggttggtcttaaactcctagtctcaagcagtcctcctgccttgactttccaaagtgctgggattacaggggtaaaccaccatacctggccatatcttttggatttattggtcatttggattttcttttgggaattacctgttcatatttttctccatttttctgctgaataatttgtcttttcttacttatttttcaagaaattttacatattttctggctgttcattgtcagttgtatgtgctccagataacttgaacagtctgtggttgccttttaatttttgaattatgtctttagttatgcagaagtttaaaattttaacataaattaatttacactatttttctcactttagcatgagtctatcagatggggatgtggtgggatttgacatggagtggccaccattatacaatagagggaaacttggcaaagttgcactaattcagttgtgtgtttctgagagcaaatgttacttgttccacgtttcttccatgtcaggttggtatctctacatttcatttttatatggctgataattgtaatatgtcaactttatccctataaaattaagttcttttattagctggccgttctctcattatctcaaatttatttaagtatttatgttctacctgattcactcacattccttgttttatttaattttcacaacatacctgtgaggcattgacattttttctgttttagagaagagaaaactgaaattttaagaggctaaatgaccaggatatgtactgctattgctagcaggagtggcattcaaactgattattttttcttgtcatttatcaatcaggactgtttgctttagttaagaaatactcaaggtcaatgtgtttctgaatttaaaattactgttaaatacaaatttacacataaacatggtatgtataagaagtaggacataaatccatcatacttgacagaacttatggaaataacaagaaaatgttacagtttttccccagggattaaaaatgttgcttgaaaataaagcagttaaaaaggcaggtgtaggaattgaaggagatcagtggaaacttctacgtgactttgatatcaaattgaagaattttgtggagttgacagatgttgccaataaaaaggtaaaagcaatatatatataattttcatgatgaagattattttgtgttacacagaatgtactttctatctgaatgttagatttttttttgaaaaagcttgttatataatgtttttgtagcaataaaaaagttccaagtgaatgttctttaatgaaaacctttatttatttatttatttttaacttttgtttcaagatcggggtacatgtgcatgtttgttacacaggtaaacttgtgtcatgggggtttatcatacagattattttatcacccgggtattaagcctggtacccattagttatttttcctgattttcttcctccctcctcccaccctccacctcccacagtgtgtgttgttcccctctgtgtgtccatgttttcttatcatttagctcccacttataagtgagaacatatggtatttggttttctgttcctgcgttagtttgctaaggataatggcctccagtgccatccatgtccctgcaaaggacatgatcttatttattttttttatggctgcatagtattccatggtgtatatgtaccacattttttttaatgcagtctatcattgatgggcatttaggctgattccatgtctttgctattgttaaatagtgctgcagtgaacatatgcgtgcatgtgtctttgtaacagaatgatttatattccttttggtatatacccagtaatgggattgctggggcaaatggtatttctttctttaggtctttgaggaattgctacacagttttccacaatggaaagcctttagttctaatccatgtcttggcatagagtttcttttctttttttttttttttttgaggtggagtttcgctcttgttgcccaggctggagtggaatggtgtgatctcagctcactgcaacctccacctcctgggtttaagtggttctcctgcctcaggctcctgagtagctggggttacaggcatgcaccaccatgcctagctaattttgtatttttagtagagacggggtttctccatcttggtcaggctgatctcgaactcctgacctcagataatctgcctgcctcggcctcccaaagtgctgagattgcaggcgtgagccaccgcacctggccggcagacagtttctttttttctttttgagacagagtcttgctctgtcgcccaggctggagtgcagtggtgcaatcttggctcactgaaacctctgcctcctgggttcaagcgattctcctgcctcagcctcccgagtagctggcactacaggcgtgccaccacacccagctaattttttgtattttttttagtagagacgaggtttcaccgtgttagccaggatggtcttgatctcctgacctcatgatccacctgcctcggtctcccaaagtgctgggattacatacagtttctttaagcaagccttctcttttccttcctcccagttcttggtactctttcactttcatatatttgcaaatgtaaaattgtgttttaggtgtatatttttaatccatgtataccagtaacttaaaaaaaaatttttttttttttaagggagagcataatggagctcttgtgatacggtgctcttagtggaagtttggctatcaattccatcacctgtatttcacatattttattaatgaagttcttaaattaaattctcatatttagccaagtattcatttggctgggaggtagaaagcctactaaccaactttttttcatgaacaatatttttaaagtccaagatttttaatacctacattagggaaattctagaattaaattcttacaatgtggactgcatatgaggcttttagtgacagggaatttgttgaaggctatctgtgggttgtattttggtataacatttcctaattttatttgtggtatgttcatttgatatcatttggtaatacctgaaaacaggaactgattttactgtgttgctttttcatcatttctagctgaaatgcacagagacctggagccttaacagtctggttaaacacctcttaggtaaacagctcctgaaagacaagtctatccgctgtagcaattggagtaaatttcctctcactgaggaccagaaactgtatgcagccactgatgcttatgtacgtgcttaaagatctttagaaattgtgatgtgttttaaaaacattattataaatgactttagaaaaattttattatagtagtggcagaaactctaccaaaatattttatatcaatttggcattgaaaaatgcttaggaagacatttagtgaaactattcattttcgatattaattagcaagtaccaatcaacagattgttcaatgctagtttattttcattgtcatgaagccaaattaatgtctaatttgtatgttaaaaaatgtgaacttgctgaaaacatgaaaggctaataaatccaggctgagcaagcataaatagtactgatgatggatttgatatataaacaattcagaatgaaaataattatagtacagtttctattttaaaactggccttatttcttatatataaaatgtggtgaaattttagaaaaattgcctccaaatttagcttgttgctgccattagatatatttttatatttacatgtttgtatgtagtgaaatctgggcttatctttatatatagcactattgtgtgttttttaagaaatgtattttattccacagtgaatttgttttctcctaactcatgctttcatttgtagatgaatattttattgtttctcctttgcatctatcaaaggaatggaaactcctttgaattgtaaccagcaaacaattcacttttgttagggaaattggatgataattttcctttaaaagataccgccaaacttgagactaacattctcagctgatttaagtaggatttctcttactagattgcattttgttagattccattttaagttattttatttggatattgtgtgtaatattgagtgtgaaaaagtgaaaacaaacttttaaggctcaggcacctttctcaattttcacaattggtatgattattaaatgaggacatattgatatttgtgtcacataataggttgaattccatgtttgggtgctttgtgaatcattctcttcgatttttctgaagatgggacttactgttttatttcggtgatctttagcatactttttaaatttttctgtttttttataggctggttttattatttaccgaaatttagagattttggatgatactgtgcaaaggtttgctataaataaaggtatgttaagatccataaataaaatgtgaattcactcttttgtgaggtttatctccaaaaaaggcaatattcacatatttgcaaagcatttagtactataacttcttgaatgtctgagcagtcctgacattagggtgggatccatcagggcccaagatgagtgtttcatctttgttacttgtggcaaagcagcccttacttcttttactttgtagcattgctatgtatttggcttctagagttggggctttgtggctttcttattgcagtgacacaaccagctttctcctagtctggagattatacatccttgctataagtatttaaaatgctttctatataatgctttaaaacatgtaagatggcttatccccaagatggtagctaataaacactaagtgataaagtaggtaaagatctatttattcatttattaaatattgttggtcattttacagtgctttctaacatactgatttacatttctaattttcttctgtcatttttctccaaaaataatggtcatgtcatccaacctcagtgctgtttttagaggtcttgataagccagtgagagcagaaggagccacgtagtagagtgggtgagcccaggctttttgttgcacagaccaatgtgaatcccagccatgtgacctgggatgtacctgtttctccaaacatggaatgtagatactagcataatgtccgttttaccgttttatagaataattgtgaagacttaaagggacaaactattcgaagcatctgtattgatataaagttatcactattctcgtagcttccttttggagattttaaatgattgtgtttgttaagatgttaattaaattaggccattttgctaaatgctcttaaaaatatggcatgactgcctcatataaaatgatatgatattctttataattgtcgttgagcctctgtgggtggcaggccctcctttatatgttaaggtagaagagtctttattcttacttctcctccctggagagccacttcctatgaatgcctgctggttctctgtagtcagaggtcttgtggctgtaacttagagtcagtctccatatccctgggttctgcatctgtggattcaaccaaccacagattgagaacattcaagccaaaaaaaaaaattcacagttttaaaaaaggaaaagttgaatttcttgcatggagtaccacattgaatctatatgaatgaagtgatgcgtaggcattttataaggtattataagaaatccggagatgatttaaagtatacaggacaatgtgtatagattatatgcaaatattgcagcattttatataagagacttgatcatctatggatttgatatcagtgggagggaggttcctggaaccaatccctcaaggatacagaggaatgactgtatgttaattaactgaggcaggtgatcggttttttaagctgattagggaaacagtatataagaacttacttaactcataataaaactaaaattcaacaggggagagttatgattttttggctttatggttgtggaattgcatgtaggttacatgtacaattttgttacatgtgcaattttgatgaaaatgcttccaaggaatgtttatgatatttttcactaaagtaacatatattaataacacagtactggaagtcctggtatctgtgtacttgtcattgtaatgctacattatttgaccttcactttttttcccctttattacattatatgtgtgagtatattgtgacatcttgactcagattccagtgaattgtattaggttggtgcaaaaataattgtggttttggtaatttttaatggcaaaaaccacaattacttttgcaccaacctaataactaagattaccatctttttttccttccttcctcccttccttcctttctgttattcagccagaagtatcagcatcactgttctcttattttcttcatgtacatatggatgatattttcgaatgaccacttttctcttttgctttttattattagactgtttttttcttcttgttaaaggataaaaagattagaacataaaaggatatttacacattgtttccccattgacttattcccaagatggtagctaaaaacaccaaatgatatagtagttaaagatacattgactcatttattaaatattgttgagcattttacgatatgggaataccgtagtgaacaagccaggcatactctgtttcctgaggggcctacagttttattggggatatagatgagtgaagaaagcaattgcagtgtagggagatgagtcttatgtcatgggaaaacaaggtgctgtagttgacacaccgagaggcatctgacacattgggggaaatattctagaatatttcctggagaaagtgcaggtaaaagccagacctgaaacctgagcaagagttagctaaggccaggtgcagtggctcacgcctgtaatcctagcactttgggaggccgaggtgggtggatcacctgaggtcaggagtttgagaccagcctggccaaaatggtgaaacaccatctctactaaaaatacaaaaaattagctgagtgtggtgacgggcacctgtaatcccagcttcttgggaggctgaggcaggagaatcgctttaatctgggaggtggaggttgtagtgagctgagattgcaccattgcactccagcctgcacaagagcgagactctgtctcagaaaaaaaaaaaaaaaaaagttagctagctgaagagtataggaaagaatgggtacaggaaattacaggtgccaagttacagaggtgagagaaattatggtatctataggtaattgaaagtaattcagtatagtgaacattgaatagggctgggcggatgaaggcaaagcagaaaaaggaaagcagatgggccatggtaaggagtttatatctcctcccaagagcaatcgaagtgactgagagttttaaacacagcagtgaagtgaattacattaaaaaaataagaacttgggctctagaataaaaaacggatataggaggaaggcaggagtcacagtaggaatatcttttgggaggctgtgacaataatccaagtgagaagtaatggcaacttgagtcggttaattgtgttgagaatggagagaagttgacaggttcaaaattcatttttcttctttttttgagtctcactctgtcacccaggctggagtgcagtgatgcgatcttggcttaccgcagcttccacctcctgggttcaagtgattatcctgcctcagcctcctgagtaactgggattacaggtgcctgccaccacgcccagctaatttttgtgtgtttagtggagatgtggtttcgccatgttggccaggctggtctcgaactcctggtctcaagtcttccgcccacctcagcctcccaaagtgctagaattataggcatgagctaccacacctgacctcaaaatacatttaatagagcaagcatgagccactatgcccagcctcaaaatacatttaataaaccaatggaatttgaggtaatgatgaaagacacatgtcaaggatcattcctgtgttgttggcataagcaacagggatgaaaagcattgaggaagagcaagattttgggatgcgttgtcacacagttgattttaggtatgttaagggagggagacctgtaagacagcaaagtggaggtggtgcaagaattagttgtgttggctgtagcacagaggacagtttgagttaagagagttgggactgagaatcccgaggaactcttagtgttgaacatttgcgtggaggaggggacaccaaaggagttgccatagacatcgaggaaattaggaggtgtggtgtgcagaaagccaagtgaagaacatgttttaagtaggaggatgctatcaactgttttaaattctgctgagagtttgagaaactgaggacttagaattcatcattagatttggcaatgcgccaatcatttgtaatcttttaaacaatagttttgctgtactgggtagcaaaagagtgatttgaggagtggtcatttggagcatatgctattcaaacagagaagagtccacgggctttggtaacatgaaggtcctataaccatagcaagagaatgaggtgggtggaagtcatattaacgtgaatagaggagtaggttagatctgaggaatgtgggaacagagacagggtctcattatgttgcccagcctggctcagactcgtggcctcaagcgatcctcctgcctcagcctcctgaatacctcgggtttcaggcctctgcatctggcttgaaaacaacattttctcagaagcttgttttagttgttttagaaataacgaaggcatgtgtaaacaactgttctagaagcttagtttggaaagggaacgtttattgatgcatataacacttatatgttgggtgcttatgtgtcaggcactgttagagttgctcgggaaaatttacaaaccaagcaaaccatgccccttcatttcctttgggtgaagtgagggagccatgtggttatctgaaggaagagcttagcaggattagagggaagaaagtgcaaagcctcctagggtgattggctggctcttttggaggaacagtacctataactgaatgaaatgagtgagggtaagagtggcaggaaatgaggctagaaaaggagcttgggccatatcacgtagggcctcgtaggctgtgaatctgacttcatttcttattaatgaaaataaatacgatgatgggtgatgggaaacccatagaggatttggagcagaagaatgatataattaaaattttattttagaaatatttttctggttgtcgtaagaggaaaaatatttagccccagggcattttggcagagagttaggaggctattgtaacagcccaagcaatagacaataattgtttggattaggcgggtagcaatagaggtgatgagaagtcgtagcttctgtaggtatttggaagatatatattgtgaaggatttgctgatgaattccctgtaaggggtgagatgtaaagattcatagaacattaagatattttggtcagatcatctgatcaatggaaaggtcagttatagtggacagattatgagaagaacaggtttgggtgagaaaactttagatttcagtgttggatatcctaagttttagatgattattgatatccaagagatatcaatatttgggatcaatttgggaaatatgatcccaaagttcaaggttgaggttggagatgtaattcagatccgatggtagttaaagcagtgagactgaatgagataaaatagggagtgaatgaaataaagagtaggtgtgatattgacctcaagggcacaccagcatttagaggttgggaagatgaggagagagcagcaaagaggactgggagggccactaatgaaggagggaagtacaggaggtgtttagttctgaagccacctgaagaaaatgtttggaataggaagaagttgtcagttgctttaaatcattcggggaggttgagtgagatgagagtctagaactaacagttaggtttgatggtgtggaggccatcagtaaccttttctttcttttttttttttgagacagagtcttgctcagtcacccaggctggagtgcagtggcgcgatctctgctcactgcaagctccgcctcccaggttcacactattctcctgcctcagcctccggagtagctgggactacgggtgcccgccaccatgcccggctaatttttttttttttttgtatttttagtagagacggggtttcaccatgttagccaggttggtctcgatctcctgacctcgtgatccacccgcctcggcctcccaaagtgctgggattacaggtgtgagccaccgcgcccggcccaagagtaaccttttcaaaagcagctttgctctactgatttgggtaaaagcttagttgcagttggtttgggaggaaatgggagcagaaaatttgagagagtgagtgtagacaactctttcaaggaatttcgctataaatgggagtagagatctgaagactgaataattagcaaactgaaaagtgggaagacgtaattctcttattatttcatttttcttagtgaaataagaggtgaagttctctgagtaataggagggtcaaacaggtgttagaagttcacaaagaaaggaagaggtttgaaatagtcattttgagagtgggaaatgtagaagaattaacagtcattgctgagggtgcgtttgaaatctgtcatgagtttaaaataacttgtgtcatcatcgatgtgtttattttcaactatattcaactgcttgggtgtaggcatcaggtaggtaaaaaaagtgggttttattatgagtagaggttttgccacgtaattaccatggagggagggaagagcaaaggagttgagagtatagatacaaaggaatgattactgtaatgtgggtaagagaggaatggaaggctcagtgggcagtgggagtagggatgttgataggtaaggaaaaggtgataggatcaatgcatttggttctgcaagtgtcaaagtattgttggggaaagcatgctggaaggaaagatagggatgctggtgttctcagggtggaaggcttacagttgtagtctggaagtggtgattttattggcaattataaggtcaacggtatgactatggaattgagtggctaaggtctgttgaagaaaagattgtcggaaatgcaggggtcaaggaactggcctgtggatgttgaactcactggcagtgatcaaggaatagtagtggagtgaaagtagttaatgaatcaggcactaagatctccaagggatgaaaggatgcagtttggagatgacaagataactgtagtaatcaggaatagcaggttttgtagctctgtctcataggcctcagaggagatgggcttttgaaggacaagagaaatgatgatgaataaattctaagcaggggaagtgtttgggaaagcagggcaggctttgtgctgttgatggcaaatgatgtaccagacaggatgaagttgagaatttggaagttgatcactgattagaaaggcttacattttattttggccgggggtggcagctcatgcctgtaatcccagcactttgggaggccaaggtgggcggatcccttaggccagaagttggagaccagcctggccaccattgcgaaacactgtctctactagaaatacaaaaaaaaaaaaaattagctggtcgtggtggcacatgcctgtagtcccagctactccgggggctagggaatgagaatagcttgaagccgggaggtggaggttgcagtgagccgagattgcgccactgcattccagcctgggtgacagagtgagactctgtctcaaaaaaaaaaaaaaggaagggcttacattttattttggtgctgactgggaatgaaggcaatgagggatgactgttggagaaggctgtgcttactaaacagtattattaagtagcagcatacatggtgttatactgacttctgattttgcaatagtacagacaggttcagattctcatttccaccttctccttctgcctaggtgaataactgctgggttatagtacagatgactgcagatcatttggaatttactttaaatgtaaacagtaaaaatttgaaagagagggaaagtgattgaggcaatttggggattgaataagaaggtctttttgttggaattcatttaaggaaagaaaatgaaaatttgatccctaatattatttaatgaagtggctaaatgaatatctctgctttgtggtttgaaaattaatattgattttttttccccctagaggaagaaatcctacttagcgacatgaacaaacagttgacttcaatctctgaggaagtgatggatctggctaagcatcttcctcatgctttcagtaaattggaaaacccacggaggttaaatattaccttttttttttttaacttaaatcaattctgtttatttttttatcacattttcctatatgtgaagaatactattcattaaggctgactcatagaaatttgcttgaatacacacacacagactgatgcataaatttgagaaatatctttccagttgttgaatagtgaatccaaaggtttaagccttttctgtctgctttgtaggatgttttatgaaacaaaggaatagaaattgtattcatattatacattttgaaattatatctatattatattttttgtcaaagcaaaataaattatacattaaggaaaatatttaagattcaaagttgtcattttctttctgttaatgagtatctttgatttaataacatttatagtttggtcacttgaaatctatagtgaccaaaagcaatgtcatatttagtagcctcatttctgttactatctgattattacttaagaattctacttaattaatagattattagaacaaaaggcattccaattttagagattcttttatggttaaagcactaggtaacttaaaaaatttggatcaaatgttatacagattaatagaccttggaatacaggggctatgtctttttggaatcagaccttgtcctggccttaattgcaggatgacttccttattaaatctctaaaagcaggaatgctctggaacaatgaacaattagaatgtggtaatgtaattttgggccaaaaaatactttgtagaaatgtgattctcttacttggaatagaaagaattctgactcgaaaaagtgcagttaatgtatgcttttctgggtaagatttgtgatagattttgattgagatttaaaaccatgatatataaatttagcttttttgtcaaagtaatttgccaccctagaatttgtgttggtaatttttaatgcaacttggacaatttctgaaagatgtaactttcttttttttgagacgagtctcgctttgttgcccaggctggagtgcagtgacatgatctcaggtcactgcaagctccgcctcccgggttcacaccattatcctgcctcagcctcccgagtagctgggactaccggcgcccgccaccccacctggctaattttttttttatttttagtagagacggggtttcaccgtgttagccaggatcgtctcgatctccggacctcgtgatctgcccgcctcagcctcccaaagtgctgggattacaggcgttagccaccgcgcccagcctgaaagatgaactttaaaatggggaaggatactagtaaagccatttcttactcatgtatacatttttccctccatgaaattagagcagccaccttttacatgacttttacatgcatttcagatttttgtactagcaattaaaatatctactggatgtaaatcacatgtgcttaatgctttgcttcataatatctgttgaagtcaattaaaatatagagacagatctttaaattgaacatgttttatttgggaagcaagaattaaatttgaggcatatacacagactgggtgtccttggtatctctgaagaacaaagagaagtttggaggttatagaaaaaggaaaatgtgacattgtttttccagaaagttctttggcactagtaaattttggggagttggaagctctgatgggttagtgactgtggtgggtaaaactagtcttagagtcacaacaggttgtttcagtatctattagataaaacaggttttaggttacaataggcagtttcagcagctaggcttgcagaaaattacattcttagagtaatgttatgtgccttgagtgcttttttccccttggcccttgactctgatttagttgggtatgacaagaattatcaatttatataattactttttacatattgaagctgaataggttttcttaaaacttggaaatgggaaatactgggtcttgtgaagttttagtgtgaaaacgataactagtctcttatttcatgctctttgtaacaagtctacagtaatacctaatgtatctagatgacacctcagaaccaggagggaacaaaaaagacctctgagcagtcaaaataatgctataagcatgtattccagcttactttcggcatttctgtggagtgcaggaggccacattttgttcatagatccagtttgacaagcttgggtactgagttaaagtgaaaatggtgtaaataagtaatcatattcacatgacagtaggtggaagtgacagctgacaatctgaaagagtggacaaaactataaaaattagaactaagaactcttaaaatagaacggtttgaagtttgttacagaagggagcagctttatgcttcagtggactctgaaggtattggcagtgtatagtactgcttagtcattgatttaaattcggtatatatctcttctattgctgtcatgtacttgacattctgctgggtgctaaggctgtctgcaggctactaatatgcataataacaatcctgaaaaagaaggaaaagtatactgtgccttactgaagaaggcaggacagccgttggtatttgttagagtaaatattagttatcttacataaagcatgttatattccctgatgtcagggcctgataaatgagcccttacactcttgatagtcaatctgtgccactgttgctgtgtttgtatgttacaccatttcctgtccatgtaacagttaaactgtatcacatatctgttcctactaaactatttgcatataattttaacatttgagtggctgtatataaagctaaaagttctttataagatttatagcatcttagaatgtttaaattagataacattagtgtgcttttagtttttgaatttaattttgctcttgattttgtttgtgttaatgtagactttgtctacgtaagcttgagcccaactttggagtggtgttttcagtgatggaagtaactggaaataactcatgaaaccacttagtacttttgatagtttattcccatgaaggatcaaatttttacttgagtcattaatataaaaatttaaaagacatgtcagattttattaagcatggattttaaatatataaatattagaagacctaaacaaaatcgctaatgaaagagtaaaacatgtccctgcctatcatactcccttcactttcactgatttctgcttttatgaagtactttaataagctctacaacaaataaacaagacattgtgcctcattttacactctagcagtggttttccattccaactaactagattgggtttataatatagtcatttaaacttacttagttaaaatgttatacattagcaactgcaattaaggagctaagaaattcagctcgtatttatttatatgcatcttatccatagtttctcacttgttatatttgcctactgatggcaaattgattttttctgttccaaaaatgtagtgttttgagatttttggagatgcaaaacagcatcattttcaaattagatcacaaacaatcttacttgttgcagttgagactagtaattgatcagtgaggtgaaaaaattaggcaaaacggtatcatcaaaattttctttctttttttttttgaaacagagtattgctcttgtcgcccaggctggagtgcaatggcacgatctcagctcagctcactggggcccctacctacgggattcaagggattctcctgcctcagcctcctgagtagctgagattacaggcgcatgccaccaagcccagctaatttttgtatttttagtagagacagggttttgccatgttggccaggctggtctggaacttcagacctcaagtgattcacctgcctcagcctcccaaagtgctgggattacaggcatgaaccaccgtgcccgccccaaattttcttttaacttaaagtgttaatgtttgtttgttcccaatatttttatatatgtcaaggctttttcattatatacaggccagctctttggagttctgcatagtgtttcttgtttaaaccacacctataatgtaccatctacaatttccaattctttaagacagagtgaaaaattaagacacctgaagcaatctgagtgcggagtcctaggcattatgattttccttgacacttttagggttcttttatcacagtttatcaaacacctttttttttttaacaaaaaacaaatttacaaaatctttccatgtattcaacttagaatttaatgaaatagggtttttttttttttggtggtcatgtatcatcaactttctttacatttaattaaattaatcaacaaaaaacatatagttgacataaacaaatttgggaccaagcactactgactcttagtaaacatacaagtcaactgttggtgcagaagtgccttgatgctagagagtagcctgcaagctgtaattatatatgggcattagggaatgaagaacagccttaatactattgatcttttaagtgaaggtcagcttagaaagcttttacttgttaaaaagcttcacagtttgtccttgtagttaatgcaattgaagttgaattaatctttcttaattttttttttagggtttctatcttactaaaggatatttcagaaaatctatattcactgaggaggatgataattgggtctactaacattgagactgaactgaggcccagcaataatttaaacttattatcctttgaagattcaactactgggggagtacaacagaaacaaattagagaacatgaagttttaattcacgttgaagatgaaacatgggacccaacacttgatcatttagctaaacatgatggagaagatgtacttggaaataaagtggaacgaaaagaagatggatttgaagatggagtagaagacaacaaattgaaagagaatatggaaagagcttgtttgatgtcgttagatattacagaacatgaactccaaattttggaacagcagtctcaggaagaatatcttagtgatattgcttataaatctactgaggtactaaataaagaggaagcacatttttagttattagtaggttctggcagactttattcccgtaaagagacagatagtaaatattttaggctttgtgggacatacagtctctgttgcagtaactcagttctgttattgtagtgtgaaagcagccacagacaaatgtaaacaaatgtgcctgtctttcaataaaactttatctacaaatacagatagtgggccacatttggcttgcgagctgtagtttgctgttcctgacttagtatgatatgcagcattgtgtagtggaaagattttatagtatcaacagacatttgtaggagtttgctattttataatttcgtatgcttttttcataatagatgtctctgctttttgtggattctcttcatatctactagtgtttactcttctgactttgatttttgggggtgtattttatttctttatacagaatttttttcttttttctttctttttttgagacaaggttttgctgtgtcaccccagctggagtgcagtggtgggatcttggccccctgcggtcttcaactcctgggcttaagcgatcctgtcacctcagcctccctagtagctgggaccacaggcctgcaccactacactcagctaatttttgtattttttgtagagatggggtttcgctctgttgcccagactggtctccaactcctggactcaagtgatccacctgccttggcctcccaaagtgttggaattataggtgtgagtcactgtgcctggcccagaatttctttacttgctcatgtgagagagtttctaataaactcctgatgcttttgcttgacactatagttttactgtcatctcagagtcagattttttccttaatttcttcattaaattgatttcttaatttctcatttgttttgcattagtttacaaaattacttaagatgcctatattctctgaaattttatattttatttcacgataaataagtttaaaaaattagatttgaccatttaattagagttatttccccatcatttttctaatggcaacaataattttagcatttgagcaattctctgtattttggtaactattagtaatcacttttatcagtataaacatgcatttcattttaaaatggttttcaaaatattctcataccaaccattcataaaagatgttccccttctgggaaatatcagtttttgctaacatctgcatttccctttgattttctaggaatttcttattaggtatacactttaagtgatatgtttcatataatattataggattatcaggatttcatgattttttttttttgagatggaatctatctctgtcgcccaagctggagtgccgtggcgcagtcttggctcactacaacctctgcctccccggttcaagtgattctcctacctcagcctcccgagtcactgggattacaggtgcccgccaccacacccggctaatttttgtatttttagtagagaaagtgctgggattacaggtgtgagccactgcacctggccttggatttcgtgatttgactgacatcttttacaccaattattgccatttttttattgggtactaattattagtattgctttctttattcgttaaataagaagtaaaagaacttttaaaaaataaaataactttttttcctagtacaaagcttattttcaattttttttattgcttaaattttgcaggttaattaaggctgtacttctttttcctacttcctgtttaaatatttggcattttttgagggttttctttctatggatttttgtgggggatcccatctcgttggacacttggttcctggagattgccaaattattgaaaagtttcctcatacccaaacattggcaatagactgaataaataacatctctgacattatttttcaattatatagagaatgctttttgtaaaatactgatttatttaaagatattacaatcatagtagttttttgcaatcttttttaaatcagtggatgtcaaggaacaactattgttctttgtacggcatttttcaacattgtgaagagttcttatactcaaaaagtttgggagacacagtgtgacattgtttaacctgagttgaacttgtcattttgtattcttgtttagagcagggattttattttgtctctttatctaactttgtattcctaactatttctttctttctctttggttctttgtttctttgttcattcttctctctctcccttttttatctatcatataaatatgtaaatatatattatatatccattagggaagaggaagttgtctaaagatatctagtatataggagctttgttctgcagaaaagaggatatgaagtcaattatattggaaattaatgcttaatactttttttaaagcatttatctcccaatgataatgaaaacgatacgtcctatgtaattgagagtgatgaagatttagaaatggagatgcttaaggtatgtttacaattataaaaatattacttcaagttctttccaaaggacatttaattaagtaaaatattaactaattctaaactaggttctaccacaatgaaattgctactaattatgtaacattagatttcacattttccaattcatgtttctttcatgtagtctataaataatgggttagaggtaatttactaattttaaatgtgctttccttgttccttcttattttttattttgaagacagggtctcactctatcacccaggctggagtgcagttgctccatctcggctcactgcaaccttcacctcctgggctcaagtgatcctcctgcataagcctcccgagtagctgggattatgggcgtgcaccaccatgcccggctaatttttatagttttagtagagacagggtctcaccatgttgtccttgctggtctcgaactctttacctcaagtaatccacccgccttggcctcccaaagtgctgggattacaggtgtgagccaccacacctggccttggatttcatgatttgactgacatcttttacacaaattattgccatttttttattgggtaccaattattagtattgttttctttattcgttaaataagaagtaaaataacttttttttaaaaaaagaacttttttcctagtaaaaagcttattttcaatttttttattgcttaaattttgcaggttaattaaggctgtgcttccttttcctactttctgtttaaatgtttggcattttttgagggttttctttctatggatttttgtgggggatcccatcttgttggacacttggttcctggagattgccaaattattgaaaagtttcctcatacccaaacattggcagtagactgaataaataacatctctgacactatttttcaattatatagagaatgctatttgtaaaatactgatttatttaaagatattacagtcagtagttttttgcaatctttttaaaatcagtggatgtcaaaaacagctattgttctttgtacagcatttttcaacattgtgaagagttcttatactcaaaaagtttgggagacacagtttgatattgtttaacctgagttgaacttgtcattttgtattcttgtttagagcagggattttattttgtctctttatctaactttgtattcctatttctttctttctctttggttctttgtttctttgttcattcttctctctctcccttttttatctatcatataaatatgtaaatatatattatatatccattagggaagaggaagctgtctaaagatatctagtatataggagctttgttctgcagaaaagaggatatgaagtcaattatattggaaattaatgcttaatacttttttttaaagcatttatctcccaatgataatgaaaacgatacgtcctatgtaattgagagtgatgaagatttagaaatggagatgcttaaggtatgtttacaattataaaaacattacttcaagttctttccaaaggacatttaattaagtaaaatattaactaattctaaaccaggttccaccacaatgaaattgctactaattatgtaacattagatttcacattttccaattcatgtttcttttatgtagtctatgaataatgggttagaggtaatatactaattttaattgtgctttctttgttccttcttttttttttttttattttgagacagggtctcactctgtcacccaggctggggtgtagtggtgccatcttggctcactgcaaccttcacctccagggctgaagtgattctcctgcatgagcctcctgagtagctgggattacaggcgtgtgccaccatacccggcttatttttgtattttttgtagagatggggtttcaccatgttgcccaggatggtcttaaactcctgggctcaagtgatctactggcctcagcctcccagcgtgctggggattgcaggtgtgagccgccgcatccagccctgtgttccttcttgtgttactttcttgtaattttttcctggaatatgggtagtgatttggctctccagtattgaaattgagtttcctttcttccaattcatgtgtatccatttttatttggaagttttgtttttatacattcaataatcatctttactttctttggtattatttactatggatattttatattatataattttcaaatggattaaatggttcagttttactcttattattgagattgaaaatactagtttataatttatatattttctattcctttacctctaatttctttgtcaggtgttactaaccaaagatgtataataagaaaagccaatgtagctaaattaagtaaaaaatgaagaaaaacacagaagttccccattatgcatttttttattcctaatctttaggttgatgagatttttttatttttatgaaatgagattaatttattgacttttttagttttgaggccaagtaatgagtagtgagtaagaatgtatattctagggccaggcatggtggctcactcatgtaatctcagcactttgggaggccgaggcaggaggatcacttcattccaggagtttgagaccaacctgggcaacatggcaaaaccctctctctccagaaaaatacaagaattggctgggtgtggtggcatgtgcctttagtcccagctacttgggaggctgaggtgggaggatcacctggggagcctggggaggttgaggctgcagttagccatgaccatgccactgcactctagcctgggtgacagagtgagaccctgtctcaattaaaaaattaaaaaaaaaaaagtagattgtgaattcagatgtaggtttgtatcccagcttttccagttagtatctgtgtgactttggggaagtttcttagcatctttgatactcggttaacagttgtaattattatttaaggtattgcttgagaagagcttagtatagagcctgacatttagtaagtgtttaatacatattagctaacagtaaaactagaacataaatactgaattgtattttgttattaattatccatttctctgagaagtactgttccaatagtacatttataggaaacttgtggacgtctacaaacgtatacattaaatctcttagaaggcaacctggatgcccatattagagaactctattttaaacatgcattctaagtatgtttgtggacttgaataaaataaaacaaacagaaacacttctttcttctgccttcaggcttgaaatgaacatacttttttttaaaaaaaaaccttcaaaatgaaaatattaaataaaagatttaataaaaagagaaagtaaaaactgtagtttaataaagtcttcctgtctcttcatagttaaaaaatgttatagatgaaacaattttgaaatattcttgaaatagataatctttatttaggggagaatgtcagatactgtcaagccaaaataaaaacaaataactttatttcatgtttgtaaaattccttttctaaaatgatttgaatcttttgttgttttgacaattccaaaacacatttattgtttgctcatagtttcagccttattcagaaagaatgcgactgacacatgatatagagaaacttgttccaaaaataacattaaaatccacgtttactacttgagaatcgaaaatattgaggtgcaataaagaataaaatgttttaaattatccaaatttaaaatttatgatagctttccccaggggcagtttattatatgctattaatgagccttgtttatgctggaaatgttccatctttggccttgcgccttagaaaccattcatgagcacatatttaaaccggagcacacatgttcttttgtagtatggcttgcacatctgccagctttcgacaaaattgtaggccctgttaataatagtccttttgtgtttggtgaaaaagatacgacactgtcagtggttttgcttttaagatttcttttaaactttcagtctttagaaaacctcaatagtggcacggtagaaccaactcattctaaatgcttaaaaatggaaagaaatctgggtcttcctactaaagaagaagaagaagatgatgaaaatgaagctaatgaaggggaagaagatgatgataagggtaagcactgaagtatgtttgaaatgactcacctgtgatacctaccactgactttaacttaggatccagttttggatggtttggaggtcagggactttgtggcatatagttaattattggatccttataagcttttgtctccttagtgcttttgtctccataaagcacaatcttactacttagaaaaatagagtaatagcattatgatgataaaaatatctttccctttgtttttttgtatttctccaaatcattatagctctcatttagaattattaaagctgagaactctaacaatgaacttttattgtttagtggttaattatcttgattctttgttttgccctttcttggccactcaggaatctttcaagctcactgtggacagggaaagtgacttgggtagagctaacataacttcattgtgctgtgcagttagaattttgaccaaagatgtgggtaactaacttttcctaactaaatgacatttaggtaactaaactaaacgagattttcgtaactaaattttggtgtaactacatttagctttaggtaactaaaacgaagattttattttatctgtggatttttttagtgcgggactaatgtaatttctgattaccattaattgaaggttggttatattataacatttggattggtatattgcttgccatggtttgttctaaatgttagcctttagaagtattcctgattctaaaacatcagttttttttaatagtcctggcaaagtgtgaatcacaacaaaattctaatacttaaaagtaatccaagtgtcacagatggtacccagaagaccagtttgtattggaattaaaaaatagaaaacattaacccatggtagctgtcactgtattctttcaaagaagccaatgaaataaactgttttctccctctatgtggtgtttttctacttgaacataaatgcacattttattttatttccagactttttgtggccagcacccaatgaagagcaagttacttgcctcaagatgtactttggccattccagttttaaaccgtgagtataatctcatttaatcaaatcacatatttagtattctctttaaaacaagggaaaaggcaaataacctgtctgcttaacagcaacagcacaacttcactatagttatacatgccacactgtattttctgtgtgactacaaaattatttcaaagtgatatttatataaaattcatttctgcaaattgtttttataagtgaggaaaaatggttttcctttaactgagcagttctgagtagaaactagtttaaagatacttataaataaatgttaatttaatactgacttgtttttcattaaacgagtgtctatgtgcctgttttgtgtatattacccagaacatgcagatgtactagaagttcttaatacaacaatttgaggaatagtgataatcttatctattttaatgtactcaaaatttgtttacatctaacaggcacatttttgtgaggattaaatgagatgaataagaatgagatgaacaagtaaatgtgaataaaactaataagcctgtgaaaatctagactggatttttcctattctgagaatttaaaatataatccactgaagtatttctttccttttttcttttgatcttaaacattttttatttatgtcttacatacagaaaagtgcacatgttgtagagatcaatgaattgtcataaactgggcaccctgtggccagcacttagttaagaataggtcagtaacagcatgccagaagaccacctctccaattgatttttcccatgatattttattaagaaaattttctaagatgtagtaaagttgaaagaacttttttctgtgcatgtctgtattcccaccacctaaattcaactatcattactatacttgctttatcacatatccatccattcatatgtctctatccatccattcattcattccagttttaaaatgcatctcagggtcaatcgaggacaccattacacttccacctaagtatttcagcatgtaaattattaacgagttaaatatttacttaacagttttttctttggtgtaaaatttgcacgtaaggaaatataaaactttaagtgtacatttgcaaattttaaatatacatgtgcatacccatgtaacccaaattcttatcaagagatattattatcatcaccacacagagttcccttatttcccttttcagtcagtccttgtccctgagcatttctcttattattttaaagtattgattcttttggatatctagtatgaagcttagaatctgttttttactttagatgtatgtagtgaaatttaatatatataccaaatggtagttgttagttagcttgaatgggacattggtcaaatggcattgtttgttttaaagttccaggtttgtgcatttatgtatgaagtttgaaaataaattctatgagaggaaatgaaaaattgaatggattttaatttgtaccttgggtttcttattaataaaacaaaatagctttttgcttttcaccttcaagagttcagtggaaagtgattcattcagtattagaagaaagaagagataatgttgctgtcatggcaactggtaagttgtacttaagcaaaacctaatcctttaaaaaaataaaacataaagagtttgaaatgcttaatctttcattaaactctcaaaatacaaatgcaactacaaatgatgtaaactatagaagagagtgaacaaagaacagatgctcagatttatgtatcaattagcttttaggaagatagcatactagtattgaccattcatctgtataagtacattgtaaaaagaaatgaaagcatcaaaggtttatttttatttctatatttttttcattttatttttatatttttttcatttcaaggatatggaaagagtttgtgcttccagtatccacctgtttatgtaggcaagattggccttgttatctctccccttatttctctgatggaagaccaagtgctacagcttaagtaagtcatgttatcattgccacaatatcaccctctttttttcttctgtgggtgaaacatctgatccatcatgcatgttaaaatctagttcacaataacacatttctgcaggtattgctttatctttattggtaataaatgaccctttagtggaagagcttaccttctttcttgtgttctctgtaattcaaagctaccaggtggccctgataaaatttttttaaaaaacattattactttatgctggtttacattgaatatctcaaaattcttttctctttttgttacccttgctttttagcttgataagaagtgtatacatggaagtatattttttatctatgaaacacttttcagcttcttcaacctgagcttgcaatctgttttaaattgatacataatatctttacatattcatggggtactgtagtattttgatacactcatatcaaatacacttgatcaaatcagggcatttgttcatcaacttgaacatttatcatttctttgtgctgggaacatttctaatcttttctttgagttattttgaaatacacagtgttgttgttaactatagttaccctactgttggttaatgagtacaaacatacagttagaaggaataggttctagcaacctattcctttaccccctgtcatcccctgctgccctgagcttgcagtctctttcaaagacccaccttaaaaacttgcattctgataaggcccttgaaggaatttgcttatcaagttagtaagtgacaaaaaagaaaattgcaaagaacaggaatataaattattatatttctttattctttctcacttaagagtgaaattgatatgtgtaatgtgtacatggtgccagaatatttgtttttcttcttatagaatgtccaacatcccagcttgcttccttggatcagcacagtcagaaaatgttctaacagatattaaattgtgagtaatttttttccctcaacttttattttggatttatgggggtgcatatgcaagtttgttacgtgggtgaattacatgttgctgaggaagttgtgagtaatttatgtcatttctaatcatgtggtcagatgtctgtggtatatgagagaattttgtatacaaacaaattttactaaatgcatgaaaaaaaaagtccatgattttaaaatgcactttcttttgtacctttgcaggactgttactttttaaatccttcaaacttgaagaaatctgttattctcggttcttgggctataagattagcattgtactcatagaattataaaaattttggttttggaagagaagttggagaatataaagatttgtctcattttatagatgagaaaactgaggctcagagacaagtaatttgcccaaaatcacacaatgactggctgagcagggactggattctaggtctcttgcccaaccaattctatcatgatgtaattcctaaggagaatgtcatctcagatacacatacacacacccattttgtgtgtgtgtgtgtgtgtgtatatgtacacacacacacaaacatatgtacacttatatatacatacacacacatatattaatatatatgcatatatatgcatgttctaattcagaacattttcatcactcccaaaagaacacccctgcccattaagcagttgctttctttacgtatatattagtatatacatacacacgagatacacatatatttactgagttttgataaatgcatacaaagatgtaaaccaaacctctaacaagatacagaatatcactgacactctagaaagtttcttcatgtccctccccagtctgtccttccatcctccatcctaggcaagccactgctccgattttctctaccatagtttggtagaatgccatataaatgcagtcacacaatattaactcttttgtgtaagacttctttcatttgctgtaatgtttctgagattctttcatgctgttgcatgtatcagtagttttttgttttgttttgttttgtttttgttttttcagagtcagggtctccttctgtcacccaggctagagtacagtggcgcaatcatagcttactgcagcctctaactactgggctcaagctatcctcctgcctctcaagtaggctaggctgcaggtatgttccaccatgcctggctaattattaaattttttgtagagacaggatcttgcttggttgcccaggctggtcttgaactcctggcgtcaggattgtttccagttttggattattacaaataaagctgagacacatataagtctttgtatggacatatggtttcattttattgatacatgtcaaggagtgggatgactggatcgtgtggtggatatatgtttaactttcttttttctgagataaaattagaaggcgatcctcctgccttggctttccaaagtgccgggattacaggcgtgaaccaccgcacctgatgcagttgttgttgttgttgttgttttaatatctgattattattttattgtatttcattgaatatagcacagtttgtttttacattttcttattgatagacacctaggctatttttctggttttggactgttactaataaagctgctatacacatccttataaaaatcttttttgtgaacatgttttctttttttctaagcattttaaatcacctttattgaggtgtaattgacttacaataaattttatatgctgagaatgtataatttgataagttttgacacaggtatgcactcatgaaaccatcatcacaatccagataatgaacatattcatcacccacaaagtttacctttttgttttaaccccagtcaccgggtaactgctgagctccttcctgttactgtagactagtttgcattttctaaacttatatacatggagtcattcatattttatgtgctcttttttgtctgatttaaataatgcagtataattattttgagattcattcatgttattacagtgattaatagttcattcctcttattgttaagtggattacattttatggatatccaacaagttgtttatccattcacctgatagacatttggatcgtttccagttttgggttattacaaataaaactgctatgaacattcgtatgtaagtctttgtatggacatatgttttcattttattatatatgacggagcggaatgactggaacatgtgatgcatatatgtttaactttcttttttctaattgagataaaattcacagaacataacttttaccattttaatcattactaaagtccagtgggttttggtatagtaataatatataaccatcataattaattccagaacattttcctaactcccaaaagaaattccatacccattaaggagtcattccctattttcccttttcttttctttctttttttttttttttgagtcagggtctccctctgtctcccgggctggagtgcacttgcatgatcttggttcactgcatccttgatttcctgggctcaattgatcctcccacctcagtctcctgagtagctgggactgtaggcatatgttaccatacctggctaatttgttttattttgagtggagatgagattttgctatgttgcccaggttgctctcaaactcctgggctcaagtaattgtcccacctcagccttccaaaatgctgggattacaggcgtgagccactctgcccggcctattatctctgttctgcccacttccaaccactaatctactttctgtctctatgatttgcctattctggatgtttctataaattaacttatacattatatggccttttgtgtctggcatcttccacttagcatagtgatatcagtacttcattcggtctttttttatgactgaataatattccatagtatgggcatacacattttaaaaattcattcatcagtgatggacatttgggttgtttcctttttggctgttatgaataatgatgctgtgaacatttgtgtaccaatttttttatgaacatacattttcaacgcttttgcatatatgcctaagagtggaattgctgggctatatgctaattttttaagaaactatgaagcttttgagagtgattgtatcatgggatattcccaccagcagtgtatgagaggtccagttcctccccatccttgctatcacttagtctggctgatctttaacttaagccattctaatagtatctcattgtatttttagtttgcttttccctaatgactaattatattgagcatttttcatacacttattggccatctgtatatcttctttgagggagtatctgttcaaatcttttgcctattttttcttagtgagttttgatagtcatttctatattctgaatataaattatttatttgatatatgctttgcaaacattttctcctagtttatggcttttcatactttccacacagttcttttgaagagcagcagtttttcattttgataaagtccagtttgtcgattcgttcttttagggattttgcttttagtgttttgacccaaggtcacaaagatttgcttttatgttttctcctaaaagttttatagttttaagttttacatttagatttacgattcatttttagtaaatgttgtctattgtatgaggtattgattacagtttatgtatttttcacatattgttccagctccattttttaaaaagactatgcttttacactgaattgactttgtacctttgtcaaaaataaattgactacatatatgtgggtctattgctgcactctctattctgtgttctgtggatctatttgtctgtcttgattggtgtcttgattactgtagctttataataaacctggaaatcaggtagcgcaaggcctcttgctttgctcttttctttcaaagttgttctggctattctatgtcctttgtatttctgtgagcatgtcagcatcaccttttcaacccatatgcctgctgggattttgaatgagtttaccttgaatctagatatcgaaacaattagctgtcttgatagttattgtcaccgttttataccgaagaaactaggcatactaaagtaacttggctaacatcacttaccttgtaagaagtagaactgggctgtttgacatcagagcttattctttataccatttcctatgttaattagaatacaatattaatttcataaaggtaaaggcatatctgttttgttcctatttgattccttgtgaaagcacaatgcctagcgcacaatagacacttaaacttatctgttgaatggacaggtgaatgcttttaaagtctttccatatagaaaattaagtttcattacatttgacttgatctaggttttcatttcatagaatggagagcagactctgtaaatattttgccccagacctagctttattacaaacattgtcttaattaggattctgtctacccagaatagaaattaactcaagctagcatgagtgtatattgaaatttatattaaggataaaggaatgtctcatagatcccactcaaaagaaattagccagcccttaggaagagactggaattgggtttggaaaatacaataggtctttctttttatctgtagtctttagtgagtcttcctcatttttctctctgaagagataagcattctctgcatatatatagcattcttttagattttcgtgacataaagtattatttaaactttcataaggtatcttgattttaagttgtaattccttgagatgattgttttctttattgttaatatgtttcccttcctgtttttttttttttcttttttcttttgtttgtttttacagaggtaaataccggattgtatacgtaactccagaatactgttcaggtaacatgggcctgctccagcaacttgaggctgatattggtaagtgataaagaaagatctctgtaaatacttactgagttaatatttaaagttaaacctatggatggacactggatttcacttctgttaaagtttatttcaaacattacttcctccaggaaatctctgactctctaacttgctgtttcacctatcttatcccatgatactctataattccttttgctatagaaattaggctctgttatcataattacctgtttatatatctgttttcttctgctaggctataaacttttcaagggaaaaatatcactttttaaaatttatgtttccccagtgcagtgcttggcatataggcacttaaacatattgttgaatgaatgttgaatcctaggttctgtgaaattttaatttacttgtttttcatgttctgtatctaaattaagtcagtgtagtggttttgtaccctctttgttcataagaatcacttttcaaactttaaaaaaaatgtaggtaaccaacacccaactctgaaaattctgatttaacaggcctgggttggcacctggcattggtggtttctcacaggtgattctgatatatagcccgggttggaaaccacagtacctttgattagttgccactagtgagtatgatttattacaaaaaccaaaaacttagataagtcacagtttatttcctagaacgtgtaaatatagaattagtcaaaagctgatagcactttttttgtacttaaaaatattttaagcctcagtatagtgagacctcatctctacaaataattttttaaaaaattggccgagcctggtggtgcatgcccatagtccaagctacttgggaggctgaggtaggaggattgtttgagcctgggagatgaaggctgcggtgagccaagatcatgctactgcactccatcctgggcaacagagcgagaccatgcctcaaaaaaaatttttttttcttcttggtggttaggcttaactatccaagaattgcaatcatggcttctattgcaaatgcccctatttcccaccttcagttggcctaaccaaatttaatttttcaatatcatatgatctttttgtataattatgtattcaaataattccagataggttaggttttcgaattgcaacgtctcatttaatggttactttcatataactgtaggaaagcatttgataatttttccaacaatgtaatgaaaacaaacttgtatcttttttattatgtgttaaaaccaacaaaagaatgagggcagcaattaacatttcattaaatatattagcaatgagtacatttatgagctcttaaactcccttattgacatactgtattttttgcctttaatggacaatgaatttgatatgtttcctaataggttgtatgaagttattgtgaatatttcactttggattaagaataactaccctatatataaatttcatggttgtattgcaaaagctggggtctatgtccatagtggtttgggtacgtttttactatttgctttgtttctgtgatagtgttaaatgaataataagcttaagtatttaagcaaatacttaatacttctgacaagtagttagaactctctatttttgtttttttgtaatggatgagttatggacactgcaattattagagcagcgtactttgcttatgatggatgaaaatgttctctggttgactcagtgttgaataaaaagggatacatgaaataaaaattatttttgaaatattttcctttgccttttgttgcgggaaattgtacaatgcttgcaaaaatgaatatacgcaggatattatttgtacagcagtctgacatttagctaatcagattcctcatttttaggtaaatgttaaattacttaagtagtctggatttttaacagaaacagcaaacatagttttatagggaggctccttaccaaccagacttttaacttaagtgaatgttggcaaaagcttgtctaaactgatttccagggataaggtttagctccattaaaagctagtttgtcaaacctgtaactaaagctttttaaaaaatgaaagttttaaaagagaccatcattctgttttaacctatttaatttaaaatctgggctgaagtaggagtattgcttgaacccaggagttcgagaccagcctgggcaacacagtgagaccccatctctgaaaaaaaaaaatgagctgagcatggtacctgttacagtgctagttatgaaagaaagaaagagagagagagagaaggaaggaagggagaaaggaaggaaggggctgggagtggtggctcacacctgtaatcccagcactttgggaggccgaggcgggtggatcatgaggtcaggagatcgagaccatcctggcgaacatggtgaaaccctgtctctactaaaaatacaaaaagaaaaaattagccgggcatggtggtgggtgcctgtagtcccagctactggggagggtaaggcaggagaatggcatgaacccgggaggcagagcttgcagtgagccgagattgcgccactgcactttagcctaagaaaaggaaggaaggaaggaaggaaggaaggaaggaaaaatcagtcactcactcaggtttagtttcaaaagccaaaacagtgataatattgaattttttccagccactcagtagtacccagagaattttgatacaaataactgactttgaccccatgtttagtaggttttttttttgtttgtttgtttgttttttttttttgtctttcttctccacactctcttaggactgttgtagcttgtaatgttagtgaattgtaattgtttatttgcatgtctgtctcctcttttagaattgtgaactcctcaggtcatggattgtattttattagtctttttattcctagaaaagtgtttggataataatagatatttattaaccataataggagtagtagcatttttgtgtgtgtgtgccaggccctattttagcattttatgtgaatgatataatttaatttttagagcatctagaaaatgttaggtaccattattatccacattttacttgtgagaggactgagacttggaaagcttaagtaacttgcttaaggtaatacacatggcagatggtggagccaggttctgcatctgggcagtctgactttagagctttttaatcatcctcctcctagtgtccgaacattattaatgctcagagaagtatcaaagaatgatgatactcattgagggaaaaaattattcttaagtatcaatttgttaattgaggacaaaagcactactgttactactgtgaaaaatctgaaaacattgtcacggatgattttacaataacatccttttctgacatgcattacaacacactattgattccgtttcaatgtttgtgtctggtatgggggcggagtagagaggctactacaggaagaaagaacaaataacatttcttcttactactttgtgcatcatgtgatttagctcctcccataccattttacattagaaaatgtggctgtcctcctgtgctctagtactggcatttcagaggactctttgcaatatgatatgtgatcaatcatggatggcgatgcagttaatttcagtagaaatttgctgactctttttatctcttttaatagctaatgcatgagataaaattgaaggtattaccaaggagaaatgcaggtggatagttttggaggcaaagtcacagtaagcaattcatctctccaaggaatagtgatgaaagctgagatccaataaatgtcttgtttggattaatacataaatatttccttttaaaattcttaaggcttttattcatatatctcccctctccctatttccaataatgatttttggtgttaatatgatgatatttatgcttctgtttttataggaaccaaatactttgatttggttatttattctcctttggagatgtagatgagtttattttttcctttcgagctttatcttttcctttatgtgtttttctttttttacaggtatcacgctcattgctgtggatgaggctcactgtatttctgagtgggggcatgattttagggattcattcaggaagttgggctccctaaagacagcactgccaatggtaagctttgccaagtctgatgtcccgaaattacattcttaataaggagagcattcaggattggggagtggtaaagaagctgaagacttcactataaaagagcaaatggataatgtaaaaagagaactatttttttaaaaatgctaaagttggtatataatctattgaggaatataatagaacaaggcttgacaaaccttttctgaaaggaccagataataaatatttcaagctttataggccacatgtagtctgtatcacatattcctctctctgttttttcttttagtaaccctttaaaaatataaagagttacatttttcactggtgggccataacaaaacaggctgtgggccatatttgtccgaatgtcttctcagtgatctttcatccgtatgtccttttactctaggatgctgtgaaatcctggttaccccttcttgtatcacattgaaaacctaaagtttgaactattctatagaaattttattaaagcttttggtattagaatttccctttcttccctaattataaaaaatagcaaattttggccgggcatggtggctcacgcctgtagtcccagcactttgggaggccgaggtgggtggatcacctgaggtcaggagttcgagaccagcctggtcaacatggtgaaaccctgtctctactaaaaatacaacaattagctgggcgtggtggcaggtgcctgtaatcccagctacttgggaggctgaggcaggggaattgcttgaactcgggaggtggaggttgcagtgagccgagattgtgccattccactccagcctgggcaacaagagcgaaactctgtctcaaaaaaaaaaaaaaaaaaaaaaaaagtgaatttttacatgaatattctacatgattggcatatttacatgaatggtttaaaaacccacaataatagcactgttttattttttattttgaaaattgtagattcacaagaagttgtaaaaaaaaaaatacctatatagaggtcctatgtacctttcatccagtttcctgaacagtaacatcttgtgtgactatagtacaatatcaaaactaggaatatgacatttgtacagtatctagagtttattcctatttctctagttttgtaagtactcttttgtatggcatgtgtattgttctatacagtttaatctcatgtacatttgtgtaactaccactgcagtcaggatgccaaatgttcccttaccacaaagctccctggagctgttcttcccacccctggccctagccactggcaaccacaaatctggtctctatctctaaaatattatttcaagaatgttatatacatggaatcatgcaatttgtcaccttttggaattagtttttttcactcaacataactaccttgagatctatccaagttgtttgtggtcatgtgttgcctaacaacagggatatgttctgagaaatgtgttcttaggacattttgtggttgtctgaacatggacttacacaaacctacatgataaagcttactgcacacctaggctatatgatagagcctattgctcctaggctgtaaacctgtacagatgttactgtaatgaatattgcaggcaattgtaatacaatggtaagtatttgtgtatctaaacttatctaatgtagaaaagacacagtaaaaatacagtataaaagataaaagatggtatacctgtatagggtgcttcctgtgaatggagcttgtaggactggaagttgctctgagtgagtgagggagtggcgagtgaatgtaaaggcctaggacattactgtacactactgtagactttatacatattgtacacttaggcgacactaaatttttaaaattttctttaaaaattttctttcttcaataataaattaatctcagtttactgtaactttaattcataaacctaaaacattttttgactttggactcttgtaataattcttagattaaaacatgaacacattgtacagctgtacaaaaattttttcttccttgattaatgcattccataaggctttattttaaaattttattatttttatttttaaaacttttttgttaaaaactaaaatacacacatatcagactagacctacacagggtcaggatcatcaatgttgctgtcttccacctccacgtcttatcccactggaagttctttaggggcagtaacactcatggagctgtcatctgtgataacaatgccttctcctagatacctcctgaaggacctgcctgaggctgtttttcagttaactttaaaaaatgaatacgtaggaggagtatactctaaaataatggaaaagggtataggtaaatacgtaaaccagtaacatacttgtttattattcatcaagttatatactgtatataattgtatgtgctatactttttaatgcctggtagtgcagtaggtttattgacagcagcatcaccacaaacgtgagcagtgccttgtgctaagacattatgctggctatgacatcacttggtgataggaatttttcagctccattataatcttatgggaccactgttccacatgtgctctgtcattgacagaaatgccgttaagtaccacatgactatttttcggtggtctgttcctttttattattacagagtattccacagtatggttgtaccacagtttaactgatcacctgttgaagaacttttgggttgttttccagtttttgactattatgaataaagatgctatgaacatttgttcatatctcaaaggttctttatttttttttatttatttttctttttttgagacagtctggttctgtcaccctggctggaatgcagtggcgcgatctcggctcgctgcaagctccgcctcctgggttcacgccattctcctgcctcagcctcccgagtagctgagactacaggcgcccgccactgtgcccggctaattttttgtatttttagtagaggcagcgtttcaccgtgttagccaggatggtctcgatctcctgacctcgtgatccacctgcctcggcctcccaaagtgctgggattacaggcgtgagccactgcgcccggccttcagagattctttaatgggtgaatggttaaacaacctgaaaatataaaagttttcatttctctgggataaatgtccaggagtgtatttttagtttttaaggaattgtcacaaacctgttttccaaagtggctgtagcattctacattcctgtcagcagtgtgtgaatgatctagttatccttgccaccgtttgttgttgcaactgttttttattttagccatttcgataggtgtcgagtggtatctcacttttaatttgcatttctctcatggctaatgatggtgaacgtcttttcatatactaatttgcctctggtgaaatttcttacataattggagtgcttgtttttttctgttgagttttaagagtttaaaaaatacattgtagatatgagtccttggtcagatacgtggtttcaaatatttctttcactttgtagcttgccttttcattctttttaccgtgtctttcacagagtaaatatttaacattttagtgaaatccagtttatcattttttcttttatggattgtgctcttcacctagccctagatcctgaagattttctcctgtggttctttcctaaaattgttacagttttatgttttaagtctgtgatccattttgagttaaattttgtataaggtgtgaggtttaagtcaaggttcattgttttcccaatagattaaattgcagcagatcctttgttgaataggctgtccttcccctgttaaattgcgtttgcccctttgttgaaagtcatgtgggtgtatttgtgtgggtctatttctgggttctctagcctgttatattaattttgaacgaataaagttggcttatgtttaagttttcttggtagtagcgaggcaatggtgccttctgagcccaggatttcacaattttgtgagtaaactgtgttagaaattgtttgttattcttttggtaggttgtctagttcaatttcattgctcattaatcttgcttatagatagcaaattgagaggcatctcaaaaatagtatcttttgttagcttatctcacagagtttggttggagcagatattaaaacaacaaaccaaaaataaattaaatatactagttagcaagtttatattgagggaaaatcaaaccatgtgaattgagctccaatgatgtggctggccttgggtcagattttagtatcatggttcaacaaggtagctattaaaatcttcatactttttcttgaaataattctttagtagtcacataggacagcacacactcatggatttcttctttccttactgtctctttattctcagcctcctgttccttctcatctccctgaccttttaatgttggccttccagaaactttagtctttggacctacctttgcactcattttcttggtcatttcacccaacatacagttttatgttattttattttttttatttttgagatggagtttcactcttgttgcccaggctggagtgcaatggcgtgaactcaccttactgcaacctctgcctcccgggttcaagtgattcttctgctcagcctccccagtagttaggattataggtacgtgccaccatgcctagctaattttgtatttttagtagagatggggtttcaccatattggccaggctggtctcgaactcctgacctcaggtgatccacctgccttggcttgccaaagtgctgagattacagatgtgagccaccacgtccagcctacagttttaaatatcaagtctatactgaggactcccaaatttttatctccatcatagactgatatcagcagtatatgagtgattcagttgtttttgcctctttgccagcatttggtgttgtcactattagttcattttagccatttaatagaatatatgtacatatatatgtgtgtatacacaggcacacatctatataactactcaacatgcctctggtgagatgaccaacaggtatctcaaacttaacctcttcctaattgacttctgcatagcactccagatctgctctttcctcactctcctccatcttgtttaacagcagctccattggccaaaattttggaattttcctcaatcttttctctttttcttacactccactgtttatttaaacagtaaggaaatctcgtgaggtcttcagaatatatgcagaattaaatcacttctctcttgatccctgccattccccaggtacgggccaccatctccttagggcctcctgctttcactcttcccatccctcattctgtttcaacacagcgtccagagtgatactttaaaaatgaagtctgatagatcatgtcttcggctcagaaccatctagtagcatgccatttcattctaaataaaggcaaaagtccttatgatgagttaccgatcctcatgtaatctggccttccattttccctctgatctcattctctactggtctcctcattcaccggatgcagccacaccaccctccttgtttttcttcggacattccaggcatgcttcagtgcctgggctttgcgcctgctgcttcctctccctgaatacgtttcccccacattgtctataggatgttctcccatacttctctcagatctcttggatttaggcctcctgggccaccatatttgaaatatcagattagttccccctcccccatcattcagcattcctcgtaaatctttgctgttttaaaaatagcactatcactgtctaacttactgtgttatattttgttaattttctgtgagttcttcttcactagaatattctttgtagggaggagtttttgattgtttggtttataaaatctggaacaatacctggcttataggaggtgctcaatttataatggggtgaatgaatgaatgaatgatgatgagaaagctgagaatcagtaaagtgactttccaaaacaggtagtgggcagtatagagttgggccataaatagctgcaccatacaacatcctgctagtttctaaagcaaatgatttgaaagaggcataaaacataatttctgccctcaggtagctcatagttcagtaaaggagtttagattcatacctataacagtagaagtaatagcaccaaatgaaatatggtattatgaagtggtacaaataatataaaaagatgaacagtgttagtagtacatgtttagaagggatttctgtggtgaaagtcactaggcacagtgcacctggaggaccgatttccattaatttagaatggtttaaagtaagcttttggaaactaggaagattactttctgtaatcctttcctaggcctttgattctagaaggattgtgttaaaggagttttaaatattttatacagttcttaaacattgttaagcttgaattaaatcttttattatgtctggccatggacgtcattggatcattttcatttcttgggaggattaataaagcacattccttctgttgggcctccagtgcggggagggtgttggccgagcagtggctgagaaaacgtttttcccctggtgttttcaagaaccctctttattagctaagtggtgagacatgccacctggtggttatagtagtatcatttttctcactgttcttggtgcttttcttctcgttctgattccagttatactaggacaactgctataaacctggaatgtttcacactatattatttcagtaatttcaaaaacagcagaaatcactaagctgtttggcacaaagattcctatttggaaggaatcagacaaagtgagtgttgagaaagaacagccaggcagaaagctttgcatcagtcttaaagttctttacatttcaagtaagaggaattgtgaaatccataagacatgtggggtttttctattactttctccccagtatctattacaaagatcagcacatagtaggtactcagtaactatttagaatgagtgcatgaatgaatgaagtatgtgtgatgttatggagtacaaagttagaattagcaacatgacctgaatttagaagcaggtgggatacttatacttttctcagtctgtgggcaccacaccattgaagtatatgtctaagattaatttatatttggttgtttgatttagcaaaacttgctgcctgttaaaaaagaaattaagacctgtcaacttaaagaatacattttgtgagttaagaactaaatgacagtataatttattacccaaagcagtttgcttctgaaaattaaagagttcaagctattaataattatgctgtgactgcaggcataaactgggaatgtcctggcaaatgaggatgtattgtcacctttctcagcctgcctgtgtgttgtttttaagcttcactctagtttatatattttaaatgtcataaaataccacatacttataagagaaaaggttctattcattgctgaagtggaagcttatcattaatttttatttatttatttttttttccagttttggaattcttattactttgaacccaagaaccactgataactagcacaatccagtgaaacagaggaagcagcagcttaatcaaaggaaaaatacatttaagattataagtctggttataagcttaaaaagtgacccagaaagggatatcattgctaaaaaaaaaaatccccttgtgacctgggtacattttgcaaagccacaggtttgcagtgttacacaagggccaaaggaggccatgagttgtctttggttgtggggccggagggtaactgttcatgaaaatagtgagtgtctgaagattaagaaaatcatgctgcagcagaggagaagggagaggaaggcaggaagggaaaggagatgcctgagggtcaaaagctgagcccaagcctaagcccaagctcaagttcaagccccagcatggcacaattttgtgaattaactcaggctgagttgcctccagtctttggaatgtcatcttatactggtactgctgaggcagagggcagtaattggttctttgggataggagaaggggcagttgctgaaatacaaaattaatagtcagcatcccaagttcctcaattgcagccaaaatacatgtgttcaggcctttcggcagtaccgcccccagaactaccagctgtagtgtggtctattcccagacagcaacatgcaagaataagtttacaatacactcagcccttgtggcttaagatcaggggctcagaggctgtgacaactcatgatgctgaaaatgtatccaatgaaaacgaagtactagcttgtttagtagtaacgaagtactattaatttttaatatagtctgatactttattttctaattgtagaagcaacattcttagctatatctttctagaatgttgaggcaaaagagtaaatttatagtgattttcactgttaccagattgctggaatagggaatttctggtagcaagatgggaatttttaagttggaagggtctaacacatcatatagccgtctccatctcattttttttgctgaaaaaactgagcccttgcaaatgtcagttgcaaatctgggagtagtactcatgtctctgaagttgttatatagaattctttttatttattttaataacaatatttatgatagttgaaactttttgagtgcttactatattttatttcatgcattatgttcagcactttacatgttttatctcacttgatattcacaactttatgagattggcactgttattgtagccattttatagatgaggaaactgaagcttagagagttaaataaagagctcaaaatctcacatctagtaagtggcaaaaacaggatttcagctcaagcaatctgattccaaaacagacttttttcactgtgctgccattcttttgcctggtttttctgttaacttcttaaatatatgtcatgtttcatgcttacttcctcattttcataaatatattacctgctcacttatacattatattgcttagaaacaaacccaaccctgttttcttatggactgtatcctgaaaatcactgtttttaatatgtggttaaacaagtgttttattagtgcatttatataaattatttaaccaaaacacttaaccggtgaaagtgctttactgtgtgagaatgtgcatgttctaagaacctctaatttttaaacctcccttattctcagccttatatttgttaaaacctgtgtgttaacacagatgcacccatgttaggggttaattagagaaaccaacctctttatagattagcttgttcatctttaagttgctaggcaggcactgtaaattcagagaacaatctgattgtaagccacaaatcaatgaaattaattttggggttgccttttaaaatagtgtcacaaaatttaaggataaagaatgcaaaaatgatgccaattatctcatcacattagttttgatttaatttttttaatttgaaaaaacctactcttaaacttaattgatttttttaaatataagtttggagataatttttaattcagtaaagttatagtgattgaaaaagtagtttataatttttaataaattgatcttgttttaattttgagtcatattctagaagtgcttctttgcaaattggtaaattgcacatacatttccacttatatacaagataattgctatggttggtttgtataatagatgcagtgcatctgaagagctattttatgagaatattgtttcttgtatctgtcacgagccaaaaagaatatttttaagaaagttatattcttggtgatagaacagctgataatttagaaacaactgtaagacagtccactttttctgattatgaaataataccatagttaagtgtaatttcctataatagaataaaaacacgagttctagttttaggggaggcatgttgttaccgtaccttagaatttctggaagatgacatattcatgcttttcctgataactgctgagtctcctgctctgtctgccaatccagtcaagaagcctttgctagcaatcaattaataatacgtttcatttatacatatttcctatatatagtatgttattgattatctcagtaccactgaagagaggttatctgggtcattggagctttgcttctagatttgtgaagccataaacctatatatttaaaataggaggccaaaaaaaaacgaccattgctttatatagttagattttcagtgaattgagagtttatcatttgtaattatacattaatcaaatataaggcataatatacccccctgcttatatcagcaccatttcaaatgtaatgttaaaaaataataaatggagaagtagatagctaacaagtaggcttaatttaataagacaaagtaaatggcatttggaaacctcatggatttaatgttttatttaaatgatttctgatttttaaaaagtaaatattgtttccagaaggctgagaaacaagttagtagggagattttttctttgcaaaaaaattttacagttgtgtctttaacattgtaccacaaactgttgtcctaccagtctctttgtaagaaagctatagacatgttgggaatgaatgagctctttcctttttaaaatatcagttttacatcattcaggttccaatcgttgcacttactgctactgcaagttcttcaatccgggaagacattgtacgttgcttaaatctgagaaatcctcagatcacctgtactggttttgatcgaccaaacctgtatttagaagttaggcgaaaaacagggaatatccttcaggatctgcagccatttcttgtcaaaacaaggtaaggatttaatggttgatgaattttggtaatgatttcctttttttttttttaacaacttatgtattttatgttatttacgatttccttctaatgcatatttaacatatttcaaattccacctagttttggttcaagtcaagcatgatgttatataatcaattcagtgattgagactagtgtatttttaaaagcagaaaccaattctcctaatattttaataccccattctgttgcttaaacagggcatatactatttatttttattttttaaaattttacttatttatttatagagacagggtctctctgtcgtccaggctggagtgcagtggtgtgatcacaactcactgcagcctcaaactcctgggttcaagcagtcctcctgcctcagtctcccaagtagctggaactacagtcttgcaccaccatgcctggctaggacatatacttttaatgattgataagtaaacaagcaaacataaaatgactctttcatctgaattctgtctagtttactaattacatgacttcagtcttaaggagcttagaaaaggtcaccttacaaacacagtggagcctgtattgtgttccaaggactattgtaggcgctttctatataaaatgatctaatttaatccctataactgctcagtaagttacgtattattttcattttattgttgaggaaactggcattagtacttttttctgtttattttgtttaaaggcattttaaatatatatgttaagaagttttcaaaagcctatattttactttttataagcctttattttactatttgagacagtgtcttgctctgtcacccaggctggagtgcagtggcgcaatcccggctcactacaacttccacctcctgggttcaagctattctcctgcctcagtctcccaagtagctgaaattacaggtgtgcgccaccatgccaggctaatttttgtattttttagtggagacggggtttcaccatggtggccaggctgatctcgaactcctgacctcaagtgatccacctgtgttggccttccaaagtgctggaattacaggtgttggccactgcgcctggccagtttataattttaaacattaaaataaatgcttcttgtccaatcatggtgtctcacacccagaatcccagcactttgggaggcagacgttggagaatcacttgaggccaggagttcgagaccagcctgggcaacatggtgaatccctgtctctacaaaaaatacaaaaattagctgggcatggtggtgcatgcctgtagtcccagctatttgggaggctgaggtgggaggatcatttgagcccaggatgttggggctgcagtgagctgagatcacaccactgtactccaggctggatgacagagcaaggccccgtttcaaaaaaaaaaaaaaagcttctaccaatacaaacacaaaacaagcatagacaaatagagtttaaagaacatcattggtgttttcctctaaagggaatattgatgctaggccaagaaaatcctggagttattcttgaggaccttaaggaataattgaaatgtaggatttgctcctggctttcttgtcctatattcagaataaaacaagaatggatcgaatatattctgagtgttctggccattctagtgctctctgaagtgagtactcactgtgtttcacttccctttcatcctaaagaggaaaagttcttttgaagaaggctgtttgtcctaggttagagtctccacagtcagatcattatctcctcctaatctttgatcctgttcagtctctatggtactttcccttataataacactctctatggcactttcccttataataacactctcctttttaaagcagtttgccttttttgtgtgtaatattgttctcctggttttctgacgtcctggtcctcttataatcctatgcaaatgtttctttctgtttttcatgttgactctgctaattgaggtctttgttactttttagccgagactattataatttccccaacagatacccctctccccagtgccccttgttgctttctatgcagtttacaaattattgtctgcaaacacatccttaagtctggaatacctttctggaactccttactaggaaataaagaccagactcagtgtaacattcaacagtattgaagatctaggtatttaatatgaatttttttttttaaggagatcaagaaagatttttgtacccatttttaatcctccaagaagacttaggatagcaggaaaccattgagagtcagaatgctttctacagatcttaggtgaacagaaactttcctcttcatgagcagtgaggtagagggtaattaaggcttcagagcattgcccgttatttccatcttcttcccttcctttaattctgctaaattcctttaatttgtttatcagtattcaagtatttttatccattgagctaaggtgtttcttaaactaaccctattttgttaaagtcttaattataatatattcatagtacatttaagtgagatagatgagtctctcatataatttagtggttagattagattagaattttctcccctcagaaaattaagaggaaataaaagtctgtagcaaatcacttggcaaaataatggctccttttgtaataggaatttttactcttttgatttatctgttacataagttcaaatttttacatattttccaccttttttaaaaaagagtgatatgtagtcaatatcaatttgagcaacactgttgcatataaattgaaaaggactccaattttctaattccgtacctcagttgtgatcactgttggtattttggcatttatgtagacttcctttctctgaccctactactgtgcagatatatagttgcagttttttgttgttgttaagttgatacagaaatagttgcatactatatccattatttatgcaaattttttttcatttaaagtatctgctatctttccatatattgcattttcttaaattagagccttaatatataggatattacaatatctaggttttgttgagtagttttttcttctttgaaaacatgtttttaaaataaggtttttttttttttttttttgacatggagtcttgctctgtcgcccaggctgtaatgcagtggcgggatcttggctcgttgcagcctctgcctcctgggttccagcgattctcctgcctcagcctcctgggtagctgggattacaggtgcatgccaccatgccctgctaatttttgtatttttagtagagacggggtttcaccttgttggccaggctggtctcgaacttctgagctcaggtaatccgcccgccttggcatcccaaagtgctgggattacaggcgtgagccactgtgctggccttaaaataagatttttatacactaaaagaaaacttacatttttcactccattaagtagttcactgtgaatttttgatattgaagcccatttggttgctgtcaaaaatagatttgaacagattattcagtatgactcttgtagtgaaattattgccttgtttcctctgcttaagttttcagtggcttttgccacagtccttaaaggttttataatttttttaatgtttaatttttaaatgtttgcttaatatttcttagtatgagtgtagataatgatgaacatttagatgactttttactattataatgttgcagtgaatatttgtttacatttatcttttggccaataagcaaatatttttgtaaattagaatcctaaaattgaaattggatcaaaagttatatgcacttgaaattgattaacttttcctaaatctaaaatagtatagtcttttttatattgtcagcataaatgaatgcacttatgtaaatgaatatttttaggcgttaagtaaaatattctgtggaaattgaacatttaagttgtttatacttctatggaaatcgtttacgcttttaataaagaagcacaagtttctacaaaatacattctaacagatgttttctataacattcagtctcaagattactagtaaatacttctttgaactgtaaaagcaatctttcaatattataagaaagctcttgctttagtaaacatttagaaactcagctttattatcataagcaagaataagaacagtgtaacaagttttatgcacactcctttgtaaaccctcaccagactaattgttaatctggtgccttgcattccccaaagtatttgtatctgtcgtttataagtttttatcaaggtttcagctaaaacaaataaatttgtttctggttttagctttaatttgaactgaaacagtcaaaactgagttttggggacttcacacaattcatttggatatttgattctccataatgttttaaattttcatgcacttaaatatatcattatttttgataggctttcttcctttagtcttttctttagaaggtagaaaggaagaattaaataagataaaaccaaacgggtctgaagcatgtataaagtatatatgtttgctcttttgttcttctttttctttagttcccactgggaatttgaaggtccaacaatcatctactgtccttctagaaaaatgacacaacaagttacaggtgaacttaggaaactgaatctatcctgtggaacataccatgcgggcatgagttttagcacaaggaaagacattcatcataggtttgtaagagatgaaattcaggtatgaggatcaatcatcattgctctccgttgctcatagtggaagtggatatttctcaaatgtttatttaccagatctttattgaatactttctttgtgttgaacataaagcagtccctctgataaatgtgggagaacaaacttgcagattagtataaatagcaatctgtacctagtgcttaggtgcacagaggagggaggaatagctctgtcaaggtagttgtgtaatgggggtggtccatccaggaaaattcaattagagtccaaacatgtaagtagaagtttttcaagtatgccaggccagtaggtgatgaggggaaaggaattggttatagaattccaggaagaaggactagcaggtgcaaagacactttgatatgagaacacatactgggttcaggaaatgtgactggtatggaatggttggagggaaagacaatgtggggtaggaatggcacaaagtatggacaaagaggcagggtggaaccgttagagacttgagagaacagttgaatgggtcggttggccaggttatagatggctttaaaacttgcaaagaagcagtctgggcttggtatcatatacctgttagttttcactgactactttagccttagaatttttagtttagatacaattttctgtaataggtaaaacggattaaagtagaataactctggctgaagttaatgtgagggaaaaggaggtacaagagtctcgtctctagaccttgaagacactccctgttggggtcttataatccttggagtgccgcagaatcatttgaaaaccatcttgatgtactactctgtgtttttaaataagataataggattatagaaacattagactggcagcaataagttggattgatttgaagaagagaaactgaagaagggaaagggtatcgatgcagctattgtgaaattctacagttgagattcctgacctgattggactggctcagtgggtgtcatagaggatttatttgggaggatttaagttcaaggcacatgagtaggtttaagtcaacaacttgacactgtcaacatgaaatccacactgtaactataagtccgaggaagagccctctcctgaagttaggaatttaacttcagctcttgcattttctgtcccaccggtcatccatttcttctctatccatctccttttctgatatctagttgttatcagtgttgttgaaaagcttaagtatgattcatattcactgtctataaagttcactacacatagtcatgctgtaatgcatacccgcctgaaagcatctggtctctcttttccttctttccaaagataagaataccattcacagctgtttagaatagaaattttatccaaattcttcagtgtttatatttttgttctgttatttcagtgtcttgaatattgtcaaatgacatttattagctactactggtactactgaatcttaataatcaatcttcaagccattaactgaccaatggtttcttctatcttaatgtattagtaattattcatttagagtaaaacatctcccagaacatgaaagaatacaaactttattcatgttacgttgtgacaggagactttgttggatgcgcctgattttcctgccaattcacagcttcattaaaacagtaatgctttgaaatatggcttaggaaacttcacaatgatcattaattacacctaatttctggaagagtatatgcatgtatgtgttgcggtattctcccttgctgtggcaggatgtcacaaatttttatccacattacgaaaatttaaaaattgatatggttttttctccctacgttgatatcagatattttgttttatctgacagctggcccaatgtactcctactttgccattataaagaattcaaaagcttcatatttgcattgaaagttctcaaacactttgtaaagatgatgaaagtatgtttcatcatctatgtagaatagtcaggtgttcttgcaattgattacttgctaccgagaattgaatacctactgagtgcataatgtatagaattctagatattcacttttgtgtgtttttacagttgttatataccttagtgtggctctaaaagtggaggtgacagctgtagctcttaatgtcttacactgagtgatgtttagaatcttaaattttcttttataattttagaaaaaagtatacttttctttcttatttttataaccagatccaaacacatttgcatgtagataggcatttttagtcttgaacattcatttttacttttaatcctcacttttattagtttcgtatctttttgtatttcatttcccctttcaagatgccttgagtcctttctttttaggaatgatgttgtgaataaattatttgataaaatgtctttacacctgagagtttataaggatagtttgaaaatcatgtctgtaaaataggttgatctcacctaaaaataataccatataattaaaattagaattattattgtgttgcttattgactcttacatatatcaaaaaattgctgagtcttattcagccagagcttttacttagtatgatattcattcctatatttacttttttctcacctttctcatactttcttttacttactcagcattttcctcctttcctccctcctttcttttcttctttccttcttttctcttcctttcgtattcctggtccatcttagcatgtaatctttctttatgaaatggcatgcagataggtctactgttcttacagtaaaaaacttcaaggcctcatgtctttcccacttctgtttcccattcacaacctttttagctgattcttttggtactttaccactatatcttgccatagtttatgtacctggctcctacttaattttttgtttatttgtgtattagtcgtaggcattatttatcgactcttctctctgaaagatgaaaggttagctctctttcacattcttaactgcccttttttcttaccttgtccatgtatttctaaccccctttcctcctaatatgtttatgtcataattttggctagattagtgtatacgatttacataattattactctgtaaatgctttttatgatctctgagccatgtagtatattatggctatttttctttcttatctatttgtatttttattgttattacctaaaaaaaaattttctatgtcttatcactaattcttccctaaaatttcccacaattgtgtaaacttacctcagtatattcatagatatgagacattctatcaattttaccctcttaaagatgcagagataatgcattatgtttcatcccaccatctttaatgagaagcttccatcttagattaatattagagaatgttaaaatactctgcaatcaggtaaggacgcttgaaacttcattataatgcaaaagttttctttaacacaataaatattttgaaccccttttgtgtcttgtattcataggagttcagatagaccactttatttactattttttatagagagtgaacagaaatcccatttctagtcaccagtccttaatctgtaaatcaggcagataatctgtaaatgattggttgaaatcacattgaattccactttgtgccagggacttaagttaacgaacaaattattcttacaaaaaggtataaatgtaaggttttcattctgctaaatatgtttgtcaaactgtgttgtgatttgttctcagtgtgtcatagctaccatagcttttggaatgggcattaataaagctgacattcgccaagtcattcattacggtgctcctaaggacatggaatcatattatcaggagattggtagagctggtcgtgatggacttcaaagttcttgtcacgtcctctgggctcctgcagacattaacttaaataggtaaaaaaaatttattgtttttactcttgcagatttctttctttctttccatataaacctcaaaagtgtttgaggctatttccagtatcccaagtaatttgtgagtgcatttaaagtaaaaaaaaaaaaaaagaaaaataaaacctccccaaatccagaggacatgtaagaagaacatttgtggtaagagttgccacttggagatgagctaatttcagcatgccttagttagtgtgaggaattaactaaatcaggacaatacttgggcctgtcacagagatcctatggaatactttcctaccattgtgcattaatgaacaggttcttttcctctcctcagatcctgtcaagttgcgatgtcttcagccatagttacttcaactaccactgattttgttactgattctttcttcccatgctacagtggtgattattccagaggatttctctcagtccctatttgactcttgttactatttgttttcttggttagttccatgagaccatgccagttctccttgactgtgtatgaatcattgtgttgcactgtactgacagactgccgtaagtcaatattaagtgttcagtatctaagtgcaggagaacctttctacttaagtactcaacaagtagtttgttggcacttaagttctatgagattttttgttgtaaaggaaaacattatcttgcaaagattttggggcagcatttaccaatactttgttccttcatccgtaggaaaaagaatctcaggagaaaaacctatacatggtaaccaatggggctgccaagctgatgaagtattttcagagtacacctttgtgtagctgaataaattgagatcttgaatggacatattagctcattttagtaaaatgataagagagtgcctcccactacagtttttgtttttatgcatcattaaacaatgtgtttttgattgtccactgtgttccatgaactatgctatgtgtgggagatatagtagtaaagaaaagcaaagtacctgcttccatagaattcagtataatgggaatggtaattctttagagaatcacataactatggatacataggcttcattttactgttctccttttgtgtttgaaaatgtcaacaatcaaaattttgtaaaaaaggaatcatgcaacatatttaaaattataactgtgttaagtgtaatgaagggaaattgcactgagtagtaagaatatataatggtgtgtggtatttcccaagttaaaaaggtcagataaggcttccttgtggaagtgatagttcaaatctgaaagaagaataggaattaattaggtaaaaatgtttgatgcaaattttaagattttccttctgagtagtcagtagcttttccttcttaacatagaagatgacaaaaccatcctttttttgtacataacaattcttgttttcctttagacagttgtatctgtcaagcttcttatgatctaatttaaataattgggatagaacacagctgtacatgttactattaaatatggaatatatcaaacataagttgattcctaccagttctgattttatttgtgtattttgttaaaggtactgaggacattaatatccagttttatattgtgcatttgaaggttcatcaataaatacaattcttgtttctctgggtcttaaaagatattttaaatggttatctcattaagatttaacaggaaataacagtgattcaaatcaaatagtggtgccagaaacccatacttgaattttgggtatagacaggttaccctttgcatcaatcctgaggaaactaaaactataggattaatcaggataaaaaagaattgagcaaggattcaggagggatctgtatcatcctggtgacaaccctcttctagaaaaaactagaaagtctaagaataaatgaagttgctggttctcacctggaaaggtcagttactcacaaaatttttagagtctatcttatgccataattctatcactgagagaagaaacttgtccagtcatcatgtaatcttcatgtaaatttatgtttttaattgcagaattcataccacaggcaaagtcccaatgtctgcatttgctgttaccttaaatagtcaaaccccaaagttattgtaatctttttttaacagagaataatttgcagagtaatctcggtccggtagatctttcagtggatccaaatgattgccatgaatggtttagaatttttttaattttcaagttgtttttattctgtggaatactggacttatttttgtagtcccaaaagaaaaataaatatttatttatttgccgttaagagttgtagttttgttttctcaaatttgtcctgacactgacgagattagttaaatgtaggtcatctgaaccaaatacaaggaaggaaggacccagttctgaagagtgtgggcatttcttttcttgtttttttttttttttttttttttttctataggaggggaacgaggtgaactaaacaaacaaaataaagcaaaaaagaactgatttttatcccttgaggtagaaagaatgagattacagtggacccccttgtctgcattttcactttctatgttttagttactcacaaccacgtccaaaatgttaaatagaaaattccagaaataaacaatttataaattttaaatcagtggtggctttgagtactgtaatgaaattttgtgccatcccactcagtctgcctcgacttcccttagaatcatccctttgtccggtgcattcacgttgtatttactccctgtctgttagtcacttgttgcagtatcacagtgcttgtgttcaagtaacgcttattttacttaagaatgaccccaaagcacaagagtactgtgcctaatttataaattaaactttttcataggtatatacatataggaaaaaacataatacatacaggatttggttggtactattctgcggcttcaggcatccactggacgtcttggaatgtatcccttgtggataaggaggaactgtatatggttaacctaggagctagagtcaacagttggaagagactttggggataattacatggaagggcatggtgggtggtcgtttcagatgacaagaatgtttttgaataacggatcatttgtgtcttcagactttccagaactccttgagaattatgcagaggtatttaatcagtcagaaggttgaatagtcaaattattagtgagtgaagtctattttgatgaggattttactaatgctgtcccttagatattataagtaaatcgttgttttcttttgaaatatctgaaacctagttaacatggactttcatttgttcttgtaaagatatgcaaagctatttgggagattgtcatcatctgatatttgatattcatgggctttcttcacagaagactagaaattaacagagtcatgatgaattatggctgcattgactttaaaaaacaaacacctccttaatgttatttaacaattttgaataaatttgatatggcaaacaaatcagttataatcgattgagaaaggaacttaattctaatacttgactggtgtcccataataacccataatactaagagacagttttggagggcgagaagtcctgaagagctgatagagataaaggttcaaatttgagcttctttcagtgttccttacgtcaatgcttttagtttctcatacaaaataaaataaagaataacctttttactgggaaaaggtaaaaattaataaattgtagaagcattgtttgaagccaaaaagtgtgtgacatgtaaattgaaatgaaaaaccttagagtttttgatactttttcaaagcagctaaagaattgatacttggacacaggaagaattttttttcaaaagcaatttttataaaatcagaaaaatgtttacctcttgttgggggcattgactggaaaggaatacaacagaactttctgagatgctagaaatgtttttttatcttgatggggtgtgggttttgtagataatgaaaaataaacagtaaaaaataagtaaaaaaaaaagtaagaaagttgccaatacagttttacatattcctgtgatgtttttaatcgacaggcaccttcttactgagatacgtaatgagaagtttcgattatacaaattaaagatgatggcaaagatggaaaaatatcttcattctagcagatgtaggagacagtatgtattatttattttatgccaatagtatggatttatggatgatgctcttttaagacaacaatttggctaaataattatcagtattttgaaaaaatattttgttgctgttacatgtgtgctgaatttttaaggctaacttctttgtgtctgagtaaactgaagtcaaataatgaagtcccaagtgaatcaattaatggtgattttacctcattattttcaggaatgaacttaacatatacgtttctgttcttttatttaatttaaaattttgtcttgggtagaatcatcttgtctcattttgaggacaaacaagtacaaaaagcctccttgggaattatgggaactgaaaaatgctgtgataattgcaggtccaggtaaagatttcttattatagatggacattctaaaagtctttctttctcttccttttcatgtttaactgaatttttgttgaatgataagtatttcagttttttaaacaaaacaatgaatgtgtttagatatgagaaagcaaacaatattaaagtattttgcttaaaaaatagataaagcaataaaatggtagccctaaatctaaacatatcaatagttatgttaaatgtaaatgatctaaaatattatttaaaggcgtaaattgtaagaattggtttaaaaacatgaccctgttctgtacgttgtccacaagaaatccactgtaattatatagataggtttaaaaaagaatgaaacattacattccatgaaaacattaatcaaaaggaagttggagttactttaatatcagacaatggacactttggagcaaagaatattatcaggataaagaaggatattatatgatgtaaaagaatcatttcaccaatgtatcagtcagggttcaccagagaaataggacgattgatattatggagatatatatatatatatatatatatatatatatggggagggaaaggaagaacaaatatggggagagagggatgaggcgactgattttgaagaattagctcacgaaattgtgggggttggcaagtctgaaatttgtagagcaggtcaataggctggaaactcaggcaagaggtgatgttgcagtcttgaggcagaatttcttctctagcaaacctagtttttgccctttagtcctgccactgagtggatgaggcccacccacattattgacaataatctcctttacttaaagtcaactgattataaatgttaatcacgtctacaaaatattttacagcaacatctagattagtgtttgaccaaacaactgagcatcataggctagccaagttgatgcataatattaatcatcacaaccaagaagacatcatcctaaatatatatatatatatatatatatatatctacttaacaaaaagactgacagaactgaaaggagaaatagagaaatctacagttacatttggtgacttccagcatctctcaataatcaataaaactgacagaccaaaaaatcagtaagaagacagaagaaatgaacaggattatcagcatgctggatctcattgacctttttagaacattctacccaacaacagtagagtacacattcaagtgcagatgcagtattcatgaacatggatcatattcagagtcataaaacaaaccttaacaaatttaagaatcttgtatttgtatattttttgactagaatggaattaaactagaaaacaataacagaaagataacagaaaagtctctaaaccttagaaattaaataacacacttataaataaatccatgagtcaaagaggaagtctcaaggcaaatcagaaaatgttttgaactgaatgaaatgaaaatacaaaatgtgtgagatgcagctaatgcaatactgagaaggaaatttatagcattaaatacctatgtaataaaagaagaaaggtctcaaatcagtacctaagcttacatcttaagcaacaagcaaataagagcaaaataaatcaaaatgaagtaaacataaggaaataacaaagaacataagtcaatgaatagaaaagctatggtcataccactgctgtccagcctgggtgacagagtgagaccctatgtcaaaaaaatttaaaaacaaagcagcatgcagcattcattgtcagtgaatagaaaatgggaaaacaatagagaaaatcaactcaaaagctcattctgtataaagatcaacaaaattgatataaacttctaacaagactgacggaaagagaaaagacacagaagaccaataccaggaatgaaagagggaatttcactacagacctcccaggtattactagggatgataagggaacactatgaacaactcagaacataactttaataatttagatgaaatggatcaatttcttgataatctcaagctaattaaacttacagtgaattagataacctgcatagtgttacaaccattagagggattgaattctatgttaaaaatctctgaaaataaaatcccctagcccaaagaatttcaatgacaaattctaccaaacatttagaagacaaaataataccaattctatagcatgattccatttatataatagtctttgaaacataaaactatactagagggatgaagaaaagatcagtggttattagagattgggggagggagaaggtatgattccaaaggatagtacaaggcagtattttggagtgatagatttatcgtgccctgattgtgatgggagttagatgaatctatggatatcttaaaatgtgtagaactttacacatacatacaaccaatttgcctatgttaattgaaaaaataaaataaaaacaaattatttacctggtgggttagctacgtacctaagttcaatagctgcgttactgtaagacaaaagaagcattattagggatggagttgttctctgtgtaatgacaaatacttcttcactaagaagacagaattgttttatgcacctttaaaaaaaaacaaaaacaaaaaaaatacaaccaacaaacagtaacttgctggtgcggtggctcacacttgtagtattagcactttgggaggctgaggtgggaggatcacttgagaccaggatttttaagaccagtctgggcaaaaaaccgagactgtgtctctacaaaaataaaaaataaataaaaaaaattagctaggcatagcattatgtgcctctagtcccagctactctggaggctaaggtggaaagatcgcttgagcctggaaggttgagactgcagttgcagtgagccatgatggcaccactacactccaggctgggcatcagagtaagactctgtctcacataaaaaaaataataataatgataaaaactagtctgggcatggtggctcacacctgtagtcccagtcctttggaaggccgaggcaagagaattgcttgaacccaagactttgagaacagcctgggcaacatagcaagaccccatctctatttaaaaaaaaaaacaaacttaaaaatccagcaaatacataaagcacaaagccgacagaagaggtggagaaatcaacaaatccaccatcaaagtgggagaatttgatataattttaagttattggtagggtaaacaatccaaaaattagtacactgtagaaaatttggtcaacatagtaataagtttgcttattactatttatcagtatacatagtatactgatttatcagatacatagtatatggagccctagagcaagcaactatagcagtgtatctcaagtatttttacttcatgacccacatagcaaatgatatgtgtatataacacactgggctaattgtcagagttcagtttctgtccaaaaccctaagatctggagtgattaacctttcagcactcttagaactcacttgtttgtagcacactgattgagaagcactgaaagacttcactcctcaaacatacatggaatatttctaaaaactatgtattgggccgggtgcagtggctcatgcctgtaatcccagcactttgggaggccgaggcgggtggatcccgaggtcaggagatcgagaccatcctggctaacatgatgaaacgccgtctctactaaaaatacaaaaaattagccggatgtggtggcgagtgcctgtagtcccagctactcgggaggctgaggcaggagaatggtgtgaacccaggaggcggagcttgcagtgagccgagatcgcgccactgcactccagcctgggcaacagagcgagactctgtctcaaaaaaaaccaaccaactgaacaaacaaaaaaactaaaaaacaaaaacaaaaaaactatgtattagagcatgggttggcaaactatggcctgtaggccaaatctgcatgctgttttatttttttttatttttttgacatagggtcactacaggctgtcacacaggctggagagcagtggtatgatcatagctcactgtaacctcaaattcctgggctcaagcaattctcttgcctcacctcagcttcccaagtagctacaggcatgcactaccagacccagttaattaaaacaaatttttttttggtagagacagtctcagtatgttgcccaggctggttttcaaactccttgcctcaatcagtcctcctacttcagcctcctaaagtgctgggattataggcatgagccatcacgcttgactaatgtttttgtaaataaagttttctcagaacacagccatgccttttgtttatgtgttatgtagggctgcctgagttaagtagttggctgcaaagcctatcatggcctataaagcctgaaatacttactatctggtcctttatagaaagtgttttctgaccctgtactagactagcttgtctcaaaattcttcaatgaatttggaagttttctcaccacattttctgaccataatgcacttgagttagaagtaaataagcagataaacaacaaaatcctcatgcatttggaaattaaaaataacacttaaataattcatattcaaagaaaaaatcaaactggaaattaaaaaaaattttaaacctacagataactacattaatatgcattaacatttttagaacttagggatagttacaatgatatacattaaaactggtaagaggctgggtgcgttggctcacgcctgtaatcccagcactttgggaggccgaggctgggggatcacgaggtcaagagattgaaaccatcctggccaacatggtgaaaccccgtctctactaaaaatacaaaaatcagctgggcgtggtggcacgcgcctgtagtcccagctacttgggaggctgaggcaggagaatcgcttgaacctgggaggcggaggttgccgtgagccgagattgggccactgcactccagcctggcgacagagcgacactcttgtctcaaaaaaaaaacaaaacaaaacaaaaaaaaaaactagtaagagggcccagtggctcacacctgtcattctagctctttgggagactgaggagagaggatcagttgaggccaggattcaagaccagtctgggcaacataacgagaccgcatctctacaaaattttaataacaacaacaaaaaaaactggtaagaggcaacattgaatagtactttgtgggagtttattagcttgaaatactcataatagaaaagaaaattaatcagctaagcatctcactaaagagattaggagaataaacctaagcatagtttttttcccccaaacattattatatctggaatattgaatgcattcttattgctatttcaaagatacttactctaaggaaagcaattgaattaggtagttgaactctatagtagattttctttaatgagtccttttgttctcaacctacttaaataattctcatttgaatttatgatagtttcagatctacccaaagggtgacttaggaatttaacttctaaatctatttaaatgaaaggtttataatctttttgtcatattttacagtcgttagcgtttaacaatttatagcataggatttgggtttttttttttttttcattttaaagaagaagtttatttaagcaagacacttgactaagggaagactatcttggagttattattactagagtaatttatttctacttaaagacagattgccccacaagtaacagctacataaaaacagttgtaaaattgtccttggttttacaatgataaatgaaaaacattaaaattctctaattgaacaaggtatgcaaggatttttatattgttttttgctaaaactatgacagcaaaataacatcctggagtataaagataagagctgaatgagcaggccactaggggacaaagggagtcttttcacagaaccaatgcttcttttgcccaccccatctccatcgaagtcaatctaaacatattattggccatttagttaaaaaaagaaagaaaagaaaagcaatatgcttgtggacatacaccagttactttatgtgcagtaaaagagtaggaaggggaaggtgaaagaatagagaaaactatgtagtcaggatgtggtggaaccaaattgcaactttctttttttttgagacagagttttgctcttgtcacccaggctggagtgtagtggtggcccaatcttggctcactgcaacctccgcctctcagattcaagccattctcctgcctcagccttctgagtagctgggattacaggtgcatgccaccatgcctggctaatttttgtatttttagtagagatgggttttcaccatgttggccaggctggtcttgaatgcctgacttcaagtgatccacccgcctcagcctcccaaagtgctgggattacaggcgtgagccactgcgcctggccaaattgtagctttctaattgagactgtcttcttggtctggaagagcagagttctgcagtaaaataacaggtcccccttttagtagacatctccatgtctgctgctggaacacatcagttttgtcttaagcctcacttccaaatgtgcagatgtgtctggttcattgattggctgcctgtcaaattgaaacctgatctgcctcattggcaaaccgtgccccttacaataggctttcattggtttactaagcggtgtggtgcgtggctgttcatcttaaactgcaccacagtttaagatgaaccttcaaatgaacattatccttgttctcagtcttgactttccttgggctttttgtggaccctggtgagtgtggcagtctcctcagctgctgcttcacaaaagaggtaccaggtctgccccgaatgagtgagcccctaaacaggaccaggagtggcagaagaaagaggcagcaactgagatgtgttttttctaagctgaaaggctttttttttttttttttttgcaacacacctttaacactaaagtccaatatttatataattggtcaagtaagtggagctgttctagctataaatatggcaactctgcttgctcgtcctattattgacattattcctttctgtggtctgaggtgcctcccatgaaacttgcttctaggacactaggattgagaaccatcagcgtaacatatctgttacgctacaatagtttattttcatattttagctactttacatactcgggtataatgaactttattcatagcttctgaagcagttggcacatttgagatattttttacttggctaattgttatgctaaatcttttgatttctaaagatacatgcctttgctaagctttcttcaaatgttattatttttatttagattggatcattgctattccatggatgactcagaggatacatcctgggactttggtccacaagcatttaagcttttgtctgctgtggacatcttaggcgaaaaatttggaattgggcttccaattttatttctccgaggatctgtaagtatatatctgtgaattcccttcatagatcttcttttacttctattacacttttcttcagaggtttgcagtattatgattgtagctttgacttcagatgggtgactaggaactcatagagtcttactaagttccagttaaacactacattcattactttggataaaacccgtgtgtatggcatcttctgctgttttcatgttcaagccgatgttcagctctgcagctcagtctggaagcattgtgttaatttatcacattgcatttgggtgaatccctagactagtcttgcttaggataattaggaaaagttaactttcattgtatcaagggacaggtagaacaaaattgtccttttgtccaggaaaccattaaattcttcaaggaaaactttagttatagggattattttttaaatgtctaatttcagtaacaatatttgggacatatttatttttccttctgtttcctatcagaagtatttaaagttataagaaaattgtggtttttgcctttactaatgaataaataatcaattaaattcagttacttttttttggagtgattgatgttccagtattcttctaaacaaccacgggtacaaatgtgaataagataggaccgttgcagtccaagagcttgttctgtagtcctttcctttatatgattttttcccctgatttagaagtctataaagcaaagctaagtattacacactgataatggctgaataaatcaagagcaagagataggatactttgcaaatatgcatatttattaaaaatgtactttaaaatagagattaaaattctcgtattgaatgtagaataggtaagcatttatttgtgaaatactcgaatgcttcatgtaaatactttctgagtttgtatttttagaaaggaacattttggaggctgaggcaggagaatggcgtgaacgtgggaggcggagcttgcagtgagctgagattgtgccactgcactccagcctgcgcgacagagcaagattctgtctcaataaaaaaaaaaaaagaaacatatttattaaattagttgtgaaatatttttaatgaaatatattgaaaacttctgttgatttttcatgtactgatgtttttagattctaaatggagtttaaaattttgtttgtaaatcacaagttggattagaaatttaatagtagaagtgttgcctaaggactattttaggtgctgtgagtgaaactgtattttttataacaagaattttagttgtaagggacagcttaaatataattgagatctgtgaaaatgtattctgtctctatcaccttcagaacctgtgtatctcagttgaatgtataatttataaaaattattcttgttttaatttggtgtaatccagccatatccagtatcaacaaataagtctaagtaggctccttgacaaacttgaactggccacaagagagatcagatttcacctattaaaaaaccaaatcagaccacttacactgacagtctcttctgggagtcctcaaattaagaagtctatcctttgtgaaatattacactacccttgctagataaaacttttctaaaagtaccacttaatgaaaatctgtagacactaaatgcaatgaaaataaggcattgtttttttttctccccatttcagtgatcttggtatcctgggatattgtttttaaaattatcgttataattcctttgagaatttagtgaaatgttccctttaaccaacttaggaaaaattaatatctttgtacatgattttgagctgtaaaataaacattttaaactgggaataattggagtttagttaaagagataatgtatataaatatataacatagtagcagcatataattctgtcttacacaagatttttctgaatagtataaacagttatgtagcctatctaggagtttgtgaatagagtttaaaattttgttttgaagctgcaaatttgattagaaattaaacagtgaagttattacttaaggaacttcgttttagctgtctgaacaacttactgtataaaaatctttaaacattctgtataaatatgtgataagatatgcaatgaccttaattttatagattagaaaataaaaacacactcattaatttacataactgacagattaagtgaaacttctcttctgatcacgttagcagaatgccaaatcttgtcgtggcactagaattagacggtagttttgataatacatgatttgactatagacatttgttgaaactattggtagttttaatcactcttgtaattttcaaactatctaacgggagaggattatccatcctgttttctagacaaactgtttcatctgaatgaaatatattcctagagataattatcactacttcatcttttggttttattttgcacatagaattatagttcacaatgactttctgaagctctaaagttgcagctgtgagcttctttggcctgtagggactgggaaaaagcacccccgtcctcccccaagcccccccaccaaaaaaagttaaagtgtttttaacaatagctgtgggctttttgtagtttcagaacttaggagttgcccaggctggaatgcagtggtgtgatcatagcttgatgcagccttgaactcctgggttcaagcaatcctcccacctcagcctccagagtagctgggaccacaggtgccaccccacccagctattttttttattttttaatttttttgtaggtatggggtctccccatgttgccctgcctgtctcaaactccagggctctcaggtgatacccaccacccttggcctcccaaagcaccgagagtcactgtgccaggctgagtttaaaatttcttgagttggagtttatggctattttttccactagttattaaacatgtatttttgtataaggcactgtattacattttgtggggggattcaaagctaaattagatgagacgcatcatctattatggaagatgttacttaagaagaaatgagtgtaatgtagcagagaattagataagggacgtatgaatacatataaatgctgttgaagttctgaagagagagagtgtttagagaaattagaggagtctttgtgaaggtatcactagaacttcctatttttgtggaatatatagtagattttggtgtgatactgtggatttggacattcactcagagaaggaatgagggaagaatggtggagaagaatggcattcacagtacaaaaagcaactgtgacttttaaagaagttaatatggagaagtggcaagtcttttcttctctcttctcttctcttctctcttctttttcttttttctttttttctctgtcagataccgttgtaaagactttgcttttaccggaaactgatacgttgggtcatgtaccctggccagtcagttctctttattctaacacttagccgatcagttagatttccacattccatgatatgtcagttttggtgacccttatttttccacctggtttataaagggaaagaatgtgatatgtcacccaggctctggagtacagtggcatgatcataggtcacagcagcctcaaagtttccagttcaagcgatcctacttccttggcttcctgagtatgtggcactacaggtgcatgccaccatgcccagctaacttttttgtagagacagggtctccctatgtttcccaggctggtcttgaacccctgacctcaagtgatccgcccaccttggcttcccaagatattggcattacaggcatgagccactgtgccggcctgaaaatttctcttttgagatggcatcccacagaagtatacctgcttagagctaacactggtaaaaagactatttaaccctattgccttattttactgtagttgagattgagttaaactgaaagctgaatgacctgtcctaggtcatactgttactttgtgccagagtcaggatgagcaaatggatttcctgcctgctagtctagtgtcttttctatttattgtgctgtaacatacagttttaaatttgtatttttatgcccaatggacatggtagctcacacctgtaatttcagcacttttgggaagccgaggtggggggattgctcgagaccaggagttcaagatgagcctgggcaacatagcgagactccgtctctataaaaaaaaatttaaaaattagctgagtggtgatgtgtgtgcgtgtagtcctccttgtgggaggttgaggtgggaggatcgattgaatctaggaattcaggactgcagtgagccatgattacaccactgcactccagcctgggtgacagagcaataccctgtctcgaatgaatgaatgaatgaatgaatgaatgaatgaatgcccaaatccgtaagctatgttctgtatagcagctttttcatcataggcagtttttactcttatcagtggacaacctacaaaattaactaaacacttaaacaattaacagaggaggccttgttcagagtgagaaatcattaagcatttgttgttgaaatttcttactgtactctgttttaattctgtttttttttttttttaatgttacttgttttagtttggattcctagttgaaaagggaatatgattcctttaaaacaaagatactctgctttaaagcaaaggtatatcatcctcttcatggtgattgccatggaaacaagacaatgtaaatttattcaaatagtacacagtttttatagttattgatcatgaggggaagggacagttaatccctactgatcagataaaacctcattgtttcatactaataaatggtttttttatgcttatgaaaggaaaagccagaagtgtaatttttagtgtttagagagctagtgattctagttagggaacttaatacctttgaagttattagtttgcaagcaatagaatctactactaccaaggtgacccctagcagatgtagagtaccattaacaagtgttccagggaaggaaagccaactagataccaagtcatgctttttactcttagattaagaaattcaggttgagttaaaggatcagctgttaactaataaaaagcagattaatattacagagccaggctctgtcctggttatggacttaatcttcacagcatcctcaagagataaaaatgaatatacctgcatattagatgaggaaatagaagataagtaacttgccagagctatgacgtgaactcaggtaatgtagcttaagagcccccacatgtatgtatattgggtgtgtgtgtggagggggtgcgtgtgagtgcttgtgcatgcgtgtggtataataagaaaaaattagcatttatgcctgtaatcccagcactttgggagaccgaggcacgaggatctctcaaccccaggagttcaagaccagtctaggcaacatagcgagaccctacctctacaaaaaaagttttaaaaatattagcgggcatggtggaatacacctgtagtctcagctgcttgggacgctgaggtgggaggatccttgagtccaggagattgaggctacagtgagctatgatgacacctctgcactccagcttgggtgacaaagagagaccctgtctccaaaaaaaaaaattagaactagttatctggaggcctgtgttctagtcctagctttagtacggctacacagtgacacattaggctaccatttaacatctttgaacctctgataatttgttaacaatatgggtaaaaatgactaagataaatcaaagagctccagcattccctccagctctgaaattctatgatgttttatcttattttacttacaaaaataaattatattatgtatatttaaagtatacaatttgatgttatgggttacctatagtaaaatgattactataatgaaactaattaacatatccatcatcttatattgttaaccatttttttgtttttgtggcaaaagcagctgaaatccactcatttagcaggaatcccaaatacagttcagttgtattaattgtaattctcatgttgtacattcgatctctagacttgtttatgctacatatgtttgacttttaaacattctactcaaatcaaccctaagtcagggttagcacagacaggacttgttaacaaggtagaaggtgccacattgtacctgggtgtttatatttctctaaatcttgttctgatcatattttaataaatataatcatcaggacaccaaaattcattccttagctattaaaaaattctattctattttattgttaagatttaggagagcatggtacagattctcttaactatacctatcagaagcctatgttttaagtccaatgtataggcactgctctgtttgtctctggtgggaacttaccctgctttacctaatttcatcctagcttcctttttgtgaaagatcacccttgcttagcctattttttggcaaatctacaccttggaaatagtagtaaatgacataagcatattaatatttatgatgtgatttatttttgttttcaagtcatatactggggaagattctcaaatattaaaacaatgtatctttacatttatgtatgtcgttcttgttctgttttagaaggcttgtatttgcatttttaacattccaaaaggtaaacctgtaatcataatgttttcatcaattcaataaaaccattacgtttgtaatagagagccctatagttgccttagttaagtttgctgcaactcattttatatattcttttaattttgatccctggatttttaattgattattaaaccttcattaggatatatatgaaatgtaaaaatattgagttataatctaccgttttctaaaattttatactgcatttttatatagaaattcaaattgctcataatcattctagtgaatttaagtagaaaggtatttattactaggtattaaatggcttataatattgttgacaaggttccactgcaaaatagttcaccaagggagctgtggcctcttctgtgatcaagaagccatctgtcaacttgggaagcttccactatagcacctaaccccagactacattgagtaggaagctgtaataatcaggaagcttctacctttgcatgctctgcaaaccaacgtgaacctgctgtaatttgtaaccacaaaatggatgcctgttgatacttacgaagctcatcattgtatgctgggttctttgctaatactttcttataaaaattaaatacctccacaatcatgcatgctagcagaaacagcagaggagtagccttagcctcacttcctgcttatacctgtcatgcaaatatacagaacccagaaccctagctgaaagggagtttgagaactagtatttgtattgtcccagattctgcagtggaagaattcatagtggatggaagttagaatgacccttgaattacaatcggccacattcatcacaaatacattaaataagagtaatttgccataaagctctatgtttgtatacttctttgttttttttttttttttttttttttttttttgagacagggtctcactctgttgctcagtctgtagtgcagtggtgtcatcatagctcactgcagtcttgatctcctgagctcaaacgattctcctgcctcagctcctgcttcagcctcctgagtagcggaacaacaggtacacaccaccacactttgctaattttttattttttattttttgtagagatgtgggtctcactgtgttgcccaggatggtctcgaactcctgggcttaagtgatcctcccaaagtgttgggattacaggcatgaaccactgtgcctggcccatatactacatatatttaaaagtagtatttaaatgtgtaggatgaatgaaagaggcagtaagagaacaaagtgaatgaaaaagtatttctatatgaagtgaaagcaggagagtcctctctgttagagaacaacagaattgcatatgacagactagctttcttaatatttctagaacttgatggctgtgaagagcgtcccgtaggaattctcccttcacttaggaaaacatacctcaaaaccatcagctgtttagcatgcacctgcttttcctggtatatctcagtgaagcagctaaattgtaaatgattaagtaaactttgcagtgtatcatgtgcaaaagcacagtaaaaacaaaaatgcattggaagctgtgagttgttgcactgcactcatggatgaatagctgttggttcgcattgcgtttttttgttttgttttgttttgtttttttgagatggagtcttgctctgttgcccaggctggagtgcagtggcgtgatctcggctcactgcaagctctgcctcccagattcacgccatcctcctgcctcagcctcccgagcagctgggaccacaggtgcccgccacaacacctggctaattttttgtatttttagtagagacggggtttcaccatgttagccatgatggtctcaatctcctgacctcgtgatctgcctgccttggcctcccaaagtgctaggattacaggcatgccgcattgcgttttatataattctcatggttctagtctcgagctgtaggattttgatcactgtttcaaacaataatgtgagtttgctaagaggtctaaataacaaaagctaagtgttccaaacacatatccaaacctatacactgggcaatgcatctgaattatatgtgaaatttcctgccattatttaagacacaaaaggaacattattttgataatgtatttatttgtgagtggagtgttcagaatgagcacgatgggtataacatttttgtaggtttttaaagttgaaatttagtgtaaatccaaagaatcaatagacaagtctgtgttttacttaacctatatgtttaaattagcatttttagatactgattttattcctaatttcagaattctcagcgtcttgccgatcaatatcgcaggcacagtttatttggcactggcaaggatcaaacagagagttggtggaaggctttttcccgtcagctgatcactgagggattcttggtagaagtttctcggtataacaaatttatgaagatttgcgcccttacgaaaaaggtaaacggtgtaggagtctgcctgtttgacttaattttgtttcccactccacattaaaagatcctttttgcttttaatagggtagaaattggcttcataaagctaatacagaatctcagagcctcatccttcaagctaatgaagaattgtgtccaaagaagttgcttctgcctaggttcatttttcagtttttttcttgtaacttctgcattttttgttgctatttatgtgattcaaattataccagtttataggcctctcacaagtaaaatgaattacctgtttgtttttgtatgcctattttagtcagtttgggggaagggatctgtgaggaaaggataagtcatagagcacttttcttttttaagagacagagtctctctgtgttgctcaagctggagtgcagtggtgcgatcatagcttactgcagcctcgatctcgtgggcccaagtaatcctcagccacctgagtagatgggactacagacatgcactactatgcccagctaatatattttaattttttgtatagagacagggtcttctagtgcttcctaggctggtcttgaactcctgagctcaagtgatcctcctgcctcagcctcccaaactactgggattacaggcatgatccaccgctcccagccagaacattttcttggttgatgggaagtagctgaccatggtatttagaaaacttctttctcatcgattaaagaagcagtactgaaatcaatgcggaggaatccatatatcatatttacttctggtgtgtagaagtggaaagggaatacatttgttgcttacttttttgtacctttacatgtgattgatcacttgtgagttttttctttcaaacatcttaaagcttccagagctttttctagaaaaaaaaatcagttttaagaatcaccagttctaaaagggtaatatcttattcatctttctgagaatggagtatcatgattcatgaattagatacttgcatcttaacatttgaaataatttaattttattattttttagttcgaaaactgtatcttcgggcaccaaagagcattgttataatcaagtaccagttgaattaagtacagagaagaaggtttgttttaaagaaattgttctgatttatttcattctttattgattcaaattctgtttaaaattttatattttaattcctttccaattaaagagaaaatggcatatataacaaagcataaaattcggccagggaagtgatgtgaacagactaaaatttattgtatataatttctggggctaataaagaattggaggtatttgagaaaggaattaatttgggttcttttaaacctatctgctaactcatttggcttagagtagtcacatgttataatacttatagttgatcaaaaaattgattcctaagtgttcttattaaagacacacacacacacacacacacacacacacattctctctctctctctctcacacacacacacatgcacacacacttatgtactttcttgctttttttgacctaagatcttagataactattacagattaaatactaatccactggcagacttcagctaattagaacactggaataataggcaagcatagtgaattacattttctggtgaactttttctgctttattgaagtatgcagaatgtaaatgaattgtttttataactttggcacttgctgtatcttagaacattcttttgatgatttattttctgtagttttgggagagataagacattggaatgcgtttctaactacctttagaactttagaaactgataatttaggaggttattttcaggtgattaatttgacagcttgattaggcaaagaaaaaattgtgattttgagatttttgtttcttattttcttcacatttaaaagttttttgaaactttttttaatggacctttatatgtttaaatgcagtctaacttggagaagttatattcttataaaccatgtgataagatttcttctgggagtaacatttctaaaaaaaggcacagagttccatatttctatgttctatacttgctttatgagtacttttttttctaaagagaaagaactgtcagatgttgggctatttcattggcaaaaggaagttaaatttaaaacataagcttttcagtattagaatgatcaaagtgagctataaaagaataatgttaatttaatagctaacacttcttggatattactgtttgtcaggcattatgttaaatgctaagaactttatatgtgatatctcatttaattcttacaagagtctaacagctgttactatttatcgccattttatagttgaagataccaagggttaagaagttgacaaacttgttcaagagcatacagctaatggccgagctggctttcaagtctatatttgtctacctctagcatcaagacactatttatttttctttgtatgaaatatatacaggcatactttgttttattgtgcctggctttattgtgacttgcagatattgcatttcttataaattgaaggtttgtggcaaccctgcgtcaaacaggtcatattagccccattttccaatagcatgttctgttgtcatgtctttgtgttatattttggtagttcttgactggccattcaccatttctctccctctcctcgggtctccctgttccctgagatacaacaaaattgaaattaggccaattaataactctataatagtctctaagtgtgtttttttttttttcgagactgagtctcactctgttgttcaggctggagtgcagtagcacaatctcggctcactgcaatcttcgcctcccgggttcaagcgattctcctgtcttagcctcctgagtagctgggactacaggcgccccccgatcatgtctggctaatttttgtatttttagtagagatgggtttttgccgtgttggtcaggtggatcttgaactcctgaactcaggtgatccgcctgccttggcctcccaaagtgctgggattacaggtgtgagccgctgtgcctggcccatctctaagtgtttaagagaaaggaagattcacatgtctctcaatttaaatcaaaagctaaaagtgattaggcttagtgaggaagccatgtcgaaagctgagataggccaaaagctaggccccttgcaccaaacagttagtttgcaaaggcaaaagttcctgaaggaaattaaaaatgctaccccagtgaataaaacaatgataagaaagcaaagcaggctttttgctgatatggagaaagttttagtggtctttataggagattaaaccagccacaacattcccttgagccaaagcctaatccagagcaaagccctaactctcttcaattctctgaaagctgagagaggtgaggaagctgcagaataaaagtttgaggccagcagaggttggttcatgaggtttaaggaaagaagccatctccataacataaaagtgcaaagtgaaacagcaagtgctggtatagaagctgtagcaagttatccagaagatctagctaagatcatcgatgaaggtgcctgcactaacagactttgaatgtagaccaaatgctttctaccagaagaagaagctgtctagtactttcatagctagagagaagtcaatgcctggcttcaaagcttcaaaggacaagctgactctcttgttagaagctgatgcagctggtgactttaagttgaagccagtgctcaattagcattctgaaaatcctagggcccttaagaattatgctatatctactctgcctttgctacatacatgtaacaacaaagtcttgatgatacctgtttacagcatggtttcctgaatactttaagcccattgttgaaacctgcttagacaaaagattcctttcaaaatgttattgctcattgacaacacttagtcaccaagagccgtaatggagacatacaaggagactaacgttgttttcatgcctgctcgcttaacatccattctgtagctcatggatcaagaagtaaattaaccttttaagtattattatttaagaaatacagtttgtaatgctttagcttctgtagatagtgattatcagagatgggtttttaagaggttttccagaaaaccttctggaaaatattcactattctagaagtcatgaagaatatttgtgattcaggagagtaggtcagaatatcaatattaataggaatttggaagaagtcgattcttattaaaatcaagagtttagtgatagacatactgagtttgggatacctgtggagtagtccagaagttaatttaaatatatgggcttagtgtacagaagtgagcagggtgcttatatatgaataaatattattttaagatatatttaaattttccttaaaataatacctatacttgatataaaaagttaattggaaattagtggcttatgacaagcataccagcccacactcttcccaaacccactttgctcttattcatagaagctgtcatcttcaaatcttccagctgatttccctggcgtgtgccttcttatttctgaatgacacgcttagagtactatttttttgacttagcaattttagaaattttctactcatctcctattatggtagatttcccctccttcattcctcctccaatataattatatttcgtcatattaataatttgtttatatatatttttaatataatatgataatattgtatttatattattaaaactacacaaatattatatacacactactaacccaaccgtgttattatggccaccactacctttatttttttccttgtgttagtgattgtctttgttttattttcttggttttgagtattccttttactaattttcttttttcctatttcaatctctcattatttgtttactcatttggagtgttccttgacttttatcccctcttacctagtgacattttaattttagttatcaaatttttaatttctaagaatgcttcttgttctcttcttgtttcttcttccccaccagccaaaaatctatgatgttatagcaaggatcatacattgtttcccagtaggttaagaaaccttggttaaaacctgttgtatcccagtaagttaaaagacgttaacgtgtcatcttcagtatggatgaaagaatattttctttcaaaagcagttggttgaggaagagaatgggacaaatgctctttttaaaacaccaattttgtgatgaactcaaattgcaattttaactttaccattataatgaatgtatttgatccaaaatgtttaaaatctaggctgttgtcatttaaataacaaattaccttactggtatcatgaagaataaatgtttgtactgatttggaaagacattctcatttaggggatgaaatagaaagtcaatgaggagaaagaaaagcttttattatttattttcttttaaatattttagtatcatggtacagtcaccagaaaaagcttacagttcctcacagcctgttatttcggcacaagagcaggagactcaggtaaggcttttgtaaaaaggtaattagtttatgataggatagttatgattctatgtatgcttaaaattctgtattttgccagcattttaaaaattgttcttaagctaagagtctgagtttatatttcagtttatattcattctaaggaaaaatgtggtatctgaagctctaaaaataaaggactagatcttttaagtacactttaaaaagtgttgtttctttgttttttgttcagattgtgttatatggcaaattggtagaagctaggcagaaacatgccaataaaatggatgttcccccagctattctggcaacaaacaagatactggtggatatggccaaaatgaggtaaactatcttttgcatgtgttctatttatttccttctaacaaaatagatttggaaaatatatctaagttgataatatgaccatagcttccactgtcacatctgggaggtgactcagattccccctgctgcgatgcttatctctttgccaagctttagtaccgtgtttctgtatgaataaaaaccagttacgttttcagcaatcatattcaatatttataaaatctaactcattatttacccaccctgcattttatccaaatgccgaaactcctctttttggattctttatttttgattatcttaccatcacatttgtagtcagaggttcctaatgcttaaaacctctgatctgaattttctctcctccaatataaaaccccttcgtcttcctcttcttcttcttcatttttttttttttttttgtctgaagacttgtctcactgtgttgcccaggctggagtgtagtggtgcgatcactgctcactgcagccttgaccccctggactcaagctatcctcgcacctcagcctcccgagtagctgggactacagaacatgccaccatgctcagctaatttttgtattttttgtagagacagggttttgccatattgcctaggctggtcttgaactcctaagctcaagcaatcttcccgcctcagtctccaaagttctggcactacaggtgtgagccactgtgcctggcctctttttctcatttaaatacttttcataccttttgtaaaacgggttccttgttgcctgtctatgccttcctcctccttcttaatgacaccacgttaattctgactgttttcccttggcctgttgcagaagcctcttaactattaacccttcattctctctctctgtttcatctgatatatgagtaccaaactaaatcttcctttatcatatcttacttctgcttaaatgttttttttctagcttagaattcaaggccctctatttatgaacttaaacttacttttccctctaagttacagaatttgaaatggtttatcttacctggattgtttatcacttgttgaagatccattttcaacttccatatatttatttacagtgttgcttctccttgtagtttccttgattcctcaaaactccttttaagaattcttgaagatctcgctttattactatttctcgctttattactgtaaagactatgagaaggtctttcatgatcttatcagcaaagtaattcctctctcttgaattcatagaggactttcagatgaattctaaagatgcttctgtagcacttaccacacaatgctatattttatttttttgtaattagtggtaaacaagtattattatatcttctagattttaaactccaaataaagatactagctccttacctttttgtgtgtctcctgtagcacctagcacaatgcctcataaacaggaggtgatcattaaatatttagaagaaattatttcccaagaatagttgcttggtaattgtatttgtcttttacttccttttaaaaaattgtttctgtcactaaattgcatccaatagatgttacttgagtgcagaattttctaatgacattacacagtgctacatctgacactaattcttttgttaaaaaataaatattctggccgggcgctgtggctcacgcttgtaaatcccaggactttgggaggccgaggcgggcggatcacgaggttaggagatcgaggccatcctggctaacacggtgaaaccccgtttctactaaaaatacaaaaaattagccgggcgtggtggcgggtgcctgtagtcccagttactctggcggctgaggcaggagaatggcgtgaacccgggaggcggagcttgcagtgagcggagatcgcgccactgcactccagcctgggtgacagagcgagactccgtctaaaaaaaaaataaaaaataaaaataaataaatattctaagaccatactttaatagaggtgttttttttttttttttttttttttttttttttttttggtgatagagtctcactctgtcacctaggctagagtgcagtggcgcgatctcggctcactgcaacctccgcctcctgggttcaagcaattctcctgcctcagcctccggaatagctgggactacaggtgcgcgctgccacccccggctaattttttgtattttagtagagatgaggtttcactgtgttgtccaggctggtgttgaactcctgagctcaggcaatccacccgccccggcctcccaaattgttgggattacaggcgtgagccacagtgcctggcccagaggagatatttaatgaaaaataataatcattagataggcagatttttagaaggagggcatcgaatgggttcttggatattggacacaataagaaatattgagctaaaagtctgaaggaattggcagatatactgttacaggtaaacactttgtagaagaaaataatgaatgagactttcttttgagattttcttagcctcttagttgttcccagttaaagcctcatatttttccttttcatgacaataaaaataataataaaatcagtaataaagtgaatatatgagatgttaacctgttcctttatgacaatgtcctgtttaccaattaacagtgtgtttttgtggtgatgggggcaagacaaatctttaaatggtggaaagcaaagaaagaaattataaaacatgattagttgtattatacgttgtttttggttgttggaaaaactatacatttattgagagaatcattaggaagctgaacatcagctatattgctggagtgatactgtttcagtggtttcttgacctttttgttgttgttgttgttgttgttaaacacagaccaactacggttgaaaacgtaaaaaggattgatggtgtttctgaaggcaaagctgccatgttggcccctctgttggaagtcatcaaacatttctgccaaacaaatagtgttcaggtaaaatactgtggtttgcaggagctcttagagaataagcattttttgtaaccatttcaaaagtaccctccagaagcaacatttgctcactttatttgcatttccatactggacacttagaaaatgaattaaaattgtttttacagtcaatctgttgtaaaaacatgtcagttatctacttttaaagatgatactaaaaagtagttgtccaggctgctgatgtctttctatttcattgggaggttttgtttttaaattggaaacattattttaggttgataaattataattttacattcaaatgtggtagttggaatttaaagctggaaagttatccttgctatgagttggtcaggagctcagccactttcttttggtttagcatcttctctaatctccctccccttccagtaatgctgtcttttgatagtaagtggatttcatattattctcttcagttttaatagtgtttccttcatatccttttattattgcttgttctgccctaagtgaccatttccagaaatgtcatttaggattttctctaaactccacgtagcagactctataatgcatactctgcagaaggtgaggcagtgggaggtagaggggagactactagactaggagtcacggaatcaggactttagttcttccttacagttgttcacctggtgaacctgcacatgtcctttaatttccttgggtctccatttcctcagctatacaatggaaatgacacttcctcccccacatccaggaaacaacagatgacattagaaaatagaagacatgggataagtataaaatgttgaaagagttaaacacattcaaggcaatattaagggattattttttacttccaagaagctcctggaagctttgggcaggcacagttggatcctactttagaaaaatctttctctaactataagtagaaaacccttctgctttttgaatgtagcatttccctcttttgatatagagtatctttggcaactttgaattttctttttcatactcttatataagacatcatgtgaaaattcttatttcttactgagtttttggaaatgaaattataatgtcttaatagtttgagaaagaatatcatacctaccagcggtaattgagtaagttccctctctttggacacttgaaagtagtatcttctttcatgaattagtgatattatttaataatgaatgagtgatctctcctaactccccttcagaagaggaaaatgaagtaggggaaaaggtaaattccccaagggataggtatgaaacctttatgaaccttctggatagagaagatgactgctgatttctgtgattagaaattatacttgggttattctgcaaattgaaatgaattatttaaaaaaaaacaactttaatgtttattaagcaagttttgttattcatgagtttcattagccttttattttttttttaaattttgaagtaaaatttcttgctgtcacaatacacattaaaaattacaaatatgacacatattaaacacattaagatggccgaataggaaaaatatgctaaaatatttttatataaatacattttttgagaattttgagaatttctggaacaaagtaatgatataatccataaatgtacaattaaagagtttaaggatatccaaaatacttggcaaagtaatctgaaataatactcttaggaaggtagggcaagaatgtgattctagtaagcaaaaatgtgatcaaatcgtattctagtcccagctactcgggaggctgaggcaggagaatggcgtgaacctgggaggcggagcttggagtaagccgagatcgtgccactgcactccagcctgggcgacagagcgagactccatctcaaaaaaaaaaaaagactatatgaacatgtatggcataaatatgtacaaatattatttattttaaaaaaattcaggggtagggacagggtagttagaaaatatctaaggatgttcatgaaataatactggctatgaatgacagttgatgaaaccgggtggtgcccatcttattccctcgactcgtgtatatgtttgatatatcccacaataaaccttaaaaaaaaaaagatgagtggtcaattataggaagatataaatagaaaaggcaataaggacaaaagttggcaaagcttacctaagcactcttcagataaaaagacatttttgctaactagatttgaatattatagtttaattgtcaaggaaaatgcctcaacttaatctttgttaagagactacttaaggcactatcagaagttccctcatggcaaggtgcaatccctcatgcctgtaatcccagcactttgggaggccaaggcaggcaggttacctgaggccaggagttagaaaacaacctgggaaacatagtgagacccgacctctacaaaaacaatttcttaaaattagccaggcatggtggtgctagcctgtaatcccagctatttaggatgcttaggcaggaggattgcttgagcccggggatttgaggctgcagtgagccatcattgtgccacaatactccagcctgagtgatagaaaaaaaaaaaaaaagtgtctttgttatattccaaacttgttctcaactttcaggtgagctggcttcctgtataactcttgtataggacagaacatactggttggggcaagtgaaactgtctagttgtatgcctcataaattaatgaatttcctttctaatatatacactgatatttatacacacatacacataaaaccaagctcaatagatgggtagtgcagctctattccccaaaacccaactaccctgtaacaagacacattagacttttgagattgcaaggatgaggactgaaatgctggcctagaccatggtgttgccatagtggggtgaccagtctgaatagccaacaatgcttcctcagtaaatacccattttgtcttggtgggatttctataaattgcaaaatgcagctattatgaagctgtaaaagagaaacagaaacatgtaacacctgggactgttttattaggcccaccgtatgctcagaacatgaaatctccactgctagggttatttgattgaaattatcttttgtgttgatgtgagagtttagctctgagattcttccacatgtaaaatgtaatcccccaaagtatttggcaagcacattttattgccttgggtcagataattgaaacattaggcatcatatatatagcatgtaaaaagtaaaacagaaacatttatgtttctcaccaagcagtaaattagtactcaactaataaatttcttaaactccctaataacagaatatggaaacaaaaaataaatctttccaaaagaagagctcatggacacatttcctcatatatgtatacataatatagtagaacacatgataaataacctataaaaatgataccaatatcattcatcaagagacgaggctcttctttaaattattaatttcatctgttacaggttttattatgactgtagtatgctgttttcatctaccttttatgtgtagttaaaaaaatagttttctatctctttacctttatttcagcctttaaaaagattccattattttttcattaatcttgtttttcagtttttcccattttttcttttaaacatttcttaaggaaccatatttaagattttatagaatacttagatttctagttgggatgtatcatttaaaattagatatgtagagagagtgttatgatatatttccttacgatatattagtggttatagtacctaaatttgaatagtgattctgttcattcattcattcattcattcaatattcacttccaggagattggggacttatttaaagacagagtagttcacattatagttcctttttttagtccttcttattcgttaaagaaaagactaggaaatgtttgttattacaaatattttattaaaattttgtgtgctctagcattattttaccttttaaaatcaatatgttaaaaatccaacttctttttgagctccccataaaaagggaattatttgttgcttatgggtttaacttgtgttatttttttcttaatggctaattatcatacatatattctattattgtattgatattactgatcatttgtgctacattaaaaattctgtagacagacctcttttcaagtacaaaacctcaagaagaacagaagacgagtctggtagcaaaaaataaaatatgcacactttcacagtctatggccatcacatactctttattccaagaaaagaagatgcctttggtaagtgtgactttcatgttacagggaatttttttagtttacttaaacttgtgttttatcagctttttagtattaaagttctgacttgggatcaatttcctccaaccctacaataaatctcagtttatctttaattttaaaagagaatgttgttttctttttctgttaagcctccctgttaagtaatagcagcaagtttagtttggccatgaatatcttctagagattgtatcggggtactgataaacacatttgtagctcagggatactgcatcagccatattttaaaatgggactaacagtttaaaaactataaatattcacagtgttaagaaacaatctcaagatgcattaagaaaaaggaaggtgcaaaacagaaaaacaaacgtaaacgtgtgtgcatatgcatgcttatatagtcacatattcttgtatgtgtacaaaaaatacacactggatctctgcaagcatagccaagcaactggaaatatgtttttaaaaacttgcttttcattctatctcttctagtactgttttgatgctctttgaaaacaatctaattgctgtaacaaatgaccatacgtaggccgggtgtggtggctcatgcctgtaatcccagcacttcgggaggctgaggcaggcagatcatttgaggccagggatttgagaccagttggacaacatagggagaccctgtctttactaaaaatacaaaaattagctgggcgtagtgacgcatgcctgtaatcccagatacttgggaggcggagacatgggacttgcatgaacccaggaggcagaggttgcagtgagctgagattgcgacactgcattccaacctgggcgaccgagcaagactcggtctccaaaaaaaaaaaaaaaaaagaccatatgtaatgtttcttcattgttctaagataaatctttaaggctgttgaggttttttgtatacaaaatggagagtaagttttaatgggatgggacaaaatgaggcttacagttgagtttaatttgagttcacatcctgttgacattaagttgatttggaacaagtgatatggtccaatgcctgcttttctattgtctgtggttccatccactagtgcctgtgttacacacctcttgttcaggttttatcatttaaaataaataagaataaacagtccatagcttatcttacttactgaataaatgctctaatttgacagtcatgtttcttaaagttccttacaaaggccattgcccaagaaaccaaataattccattatactatttttgaaatagaacacataataaatgggaattttaagttcagtttcttatgtaaacaataacttctatgtacatgttaaatatgcctgtatatacctaatttgaccatgtatgtatagtagaaatgaaaacagttactaagaaaatttgttattggctccaaattttctgaattaagtgtattctaatgctcagccataatatggggtttcatgtgttagtttatgtattcatggttaaaaatgtgaagactgttatatcttcatttgtgtcttttggtattatttggttgtattttattgtgtgatatggtggtataattatccttacctcccaggagtttgagagggtcttgccagttaaccgcagaattaaacatgcttaggactaattaatcaggagcaatactacaattagttggaggtaatttgaaacctggtttcaaataaccctgatattatgcacacatggtgcacacttttctagtagacatttaatgaaagtaatttaaaacctacctttgaaggatgaaaaacattgccttaaatgctctattctgtgaaagtatcaacatttatgcaaatacagtctaaattcagactttgaaaatgtattgaaagagaggatcatgaaataagttagagctgagtgacaaagctttctgagtgtttaaaagaatgttttacctaataaatatctgaaatgtatttggagccacatttgtttaaagaactgtataaatatgtagcactgttcatgtgaagttcaatagtaggaaaatgctgacagcccttgtggaactgtggttattattattttatgaatagagccaatttcaaacacctattagagtcttctcaggaacattttatagaatgcatctggagccttatgttatctctaagcattttaggatttgtcttcttggaaattcatgtaaccaaaccaccatgtgttatttcaagtgtatatagtattgggttacagtttactatgttttcagaaggttgtgacaactattagacttacagagaatgacttctctgccactaacggctttctaaagtgaatagagaggggcgaggattgaattcttcggtaaagctgggtgattttgttttattcaatacagtataataagtataaaaagtagaacctatagagagctataatgggggtagttttaaagaaattctgaaaatgaaaaacttaagtaaaggtttagttcattgtttatttcacactgagcatttactacctgaatgttttggacattttatttccatgactggagtggacacttttacaactcactgggttctttgctgatctttctctagaagagcatagctgagagcaggattctgcctctcatgacaattggcatgcacttatcccaagcggtgaaagctggctgcccccttgatttggagcgagcaggcctgactccagaggttcagaagattattgctgatgttatccgaaaccctcccgtcaactcaggtgagaggcatggcctagctctgcacccttaatgacttgatgaagtaaacaagcaatccactatatttttcactgttaacagcattaatcctttatgctattatgaaaaccttacttttgtgattctttttcttgttttaggaaaacaatctttcttcccattatcactcagaggaaagtatactgagaaatttttttgttttgttttgttttttgagacagagtcttgctctcttgtctaggctggagtgcagtggcgtgatcttggctcgctgcaacctctatctcccaggttcaagtgattctcttgcctcagcttcctgagtagctgggactacaggcgtgtgccaccatgcccagctattttttgtattttttgatagagacagggttttccatgttggctaggcaggtctcgaactcctgacctctgatgatccgcccacctcagcctcccaaagtgctgcgattacaggtgtgagccatggcacctggccaatacactgagaaatttttattttccttttcagcttaaggttacaacttccccaccatccaaaacgtgcactttcattttttttctaatttctatctcatcacttgcaaaaaccatatttttctccacattcattcccagtagcttcctgactcctagttcttccctaaatccttctgagtccttgtcattggtttcgcttgagtagcctttctaatcaacacagtcattggtatcagttactgtgacatggaagggacagaccaagttctgtgggccgctacgtagaaggatttcctgtcactttgctgcagaacctcagctcgcggagagcaagcccctttgcttgccctgtagaaatattttaaattattatcctttttttttttaacagaagtaaataggagatacgttagaggattttctctcctagatgtgtaaatacaaacttggggtcttataactcaataaatctgataaatttcttttgactgttaggatagagcagtggccataccaatagcctcatctccaaagctgcagtgaagatactttttactaccttaaagtctttcccatttgtgaacaacttgtgaacaattccccccaagaatttggaagatcactctctgaaagcacagtcaatactgtacttaaatggatctgagcaaaaataagtcacttagaagacaggattatttctagacttgagtgtgacttgactgaaggtctaaagaacaaacagctccttcacttccattgatcacggtggaagcacagggaaaggacagacacggaggcaagttggagtagtgctcatctaagttccagggatgcgggggagtggccaggggacttcaggtatagtaaataaataacctatttataagttatgtcaatgtcatgtttgaaatagaaaaccaaatactgcatgttcttacttacaagcaggagctaaagttggtgcatatggatataaaaatgagaacaggccgggcgtggtggcttgtgtctgtaatcccagcactttgggagacctagatggaaggattgcttgagctcaggagttcaagaccagcctgagcaacatagtgtgacccccatctctacaaaaaataagaaaattagccagacgtggtggcatatacctatagtctcagctacttgggagtctgagtcaggaggagtgcttgagctcaggagtttggggttataataagctgtgatcatgccactgtgctccagcctgagtgacacccagagtgagaacctgtctcaaaaggagaaaaaaaaaaaagtaacagtagacgctggggactactgaggggagggaaggaacaatggttgaaaaggtgggaagggacagtggttgaaaaactacgtgttgggtactatgctcactatctgggtgatgggatcaattgtacctcaaacctcagcatcctgcaatatactaatgttacaaacctgcccatgtactacctgaatctaaagtaaaagttataatttaaaaaaattataataaaatcagaaaataaaggtctgagatggaaaattaaaagaccaaagccacccataagcacaataaatccctccccccaaaaaattatatctattaaaaaaaggtgttgcgccaggcactgtggctcatgcctataatcctagcactttgggaggccaagacgggcagatgacttgacttgaggtcaggagttcaagaccagcctggccaacatggtgaaaccctgtctctactgaaaatacaaaaattagccagcagtggtggcatgcgcctgtaatcccagctactcaggagactgaggcaggagaatcgcttgaactggggaggcggaggttgcagtgagccgagatcatgccactgcacttcagcctgggtgacagagtgagactctgtctcaaaaaaaaaaaaaaaaaaagaccttgtaccctgacaagttttagtttgtgcaggaatgctagaatgactcaagattggaaaaatctttaaatgttaattacacaataagggtaaaaggagaaaaattacctaatgtcatctgagcaacaagaagaagaaatgaaaggcattaaaaattgggaaaaatttatatttgacagtatcttaacaacgaattctgcttctatatcacttcctagctttctgatgataacttcccgtgcagatctgtatgtaaggaatggacgtagtagtcatgctaatctgagtatttatctgtgtgatacttacgaattaacgatgtaagttaataagttagcatttcgtgaacctggttaataccatttgctaaggttaaattagccaaatcctgaagtaagctgtaaaacatccaaggtagggtagagaggcatcttatgagaaagctggccaactctcctggtcaccttctaatcttcctaacttcagaaatcaaggcagagagaggaaaatagtaattactttgtaggattagatttatggttgtcgaaacctttgtttctccagtgcagaatgagatagcgttttagggaaagccaaagactcagatgtcttcttcatgctcatcgtgtggaatttttcttcctttagaaatgtattgtctctcagggcttaaagcaatttgcatctttcgatgagacattgagtaataggcaatattctctgaaataatttgtgcaggctgggcacagtggctcacacctgtaatcccagcactttgggaggccgaggcgggcaggtcactgaggtcaggtgttggagacgagcctgaccaacatggtgaaaccccgtctctactaaaaataccaaaattagctgggcttggtggcacacacctgtaatcccagctacttgggaggctgaggcaggagaattgcttgaacccccatgggaggtggaggttgtggtgagccaagattgtgtcattgtactacagtctggacaacagagtgagactctgtctcaaaaaaaaaaaaatagaatttgtgcagttccccccacccccttttttttttctgttggcatttttgctatcatttagctgccttctttatatcctgaaacttacaggtggtgttggtctagtcagtaagagcaaaggctttgggaatagatagatctgtatttagaccttggctctagcatctcattgttatgtgacctccatcaagtgacctaatttccctaatattcaatttcctcatctctaagacagggagttaatattgcctctcttatagaattgtgagaaatatagtcatgtgtcgcttgatgatggggatgaattctgagaaatgtgttgttgggcgatttcattttgtgggaacctcacagggtggacttaaacaaacctagatggtatggcctactacacacctaggctgtacggtatagctcctgtcttcaaacctgtacagcatgtgactttactgaacactgtaggcaattataacacagtggtatttgtatatataaacatagtgaaacatagaaaaggcccagtagaaatacagtgtaaaagattttttaaaaaagctgggcatggtggctcacgcctgtaatcccagcactttgggaggccgaggcaggcagatcacttgaggtcaggagttcaagaccagcctggccaacatgatgaaactccgtttctactaaaagtacaaaaattagctgggcgtggtgttgggtgcctgtaatcccagctactcaggaggctgaggcaggagaattgcttgaacccaggaggtggaggttgcagtgagtcaagattgtgccactgcacttcagcctgggagacagagcgagactctgtctcaaaaaaaaaaaaaaaaaagagataaaaaggtacatctgtacagggcacttaccacgaatggagcttgcaccctgggagttgctctgggtaagtcagtgagtgagcggtgagtgaatgtgaagacctaggactgtgcactgctgtagactttataaaccctgtgcacttaggccacactcacccctgtgatacgagtctacctactgtataacgtacctgcatatgtacccttgaaactaaaacaaaagttaaaaaatttatcttcttttgccaataataaattaaccttagcttactgtaatgattcttctttatgaattaaaatctttttactcttttgtaataacacttggcttaaaacacaaacatattgtacagctatacaaatatattttctttatatccttcttctctaagattttttctgtttttgattttgttaaatttgtttttactttttacattttttttgttaaaaaccaagacaaaaacccacacatcagcctaggcctacatgggctcaggatcatcagtctcactatcttccacctccacatcttgtcccaccaggtcttcaggggcagtcatatgcatggggctgtcatctcctgtgataacaatgccttcttctggacacctccagaagggcctgcgtgttttacagtgaacttctaaaaaataataaaatgtatagtatagcaaacacataaacatagtaacatagtcatttattatcattttcaagtattatatactgtacataattgtacatgctagacttttacacagctggcagcaaggtgagtttgtttacaccattaccaccacaaacacatgggtgatgctttgcattgtgatgttacgatggcatgatgtcactaggtggtaggaacttttcagctccatgataatctaatggatacttgttcctgttggctgcccgtcgttgactgcaacatcattatgtggtgcatgactgtaaattagatactgttcagaaagctttggcacactggtaatagcaaatggtggtggcaaatatgatgatgatgatgatgatgattgaagacatagatggtaaaattttatggtgtcttaaaagtaccctctaaatatgattatttttatagtctgtccttttgaataggcacttaagaatgtatgaacttaataagtatataagaaagaatgttccccaaaatatatcttacagaggcatacaatttaagaattcaaacaggttgtaatggggtgtgtgtgtgtgtgcacacgcgcacgcatgcgtgctcattcacactaaagaattcttgggcatatgttcctgaatgtcctaaatggacattctaacatcacttcattatgggcagagggaaatggtaaagaaaaatttcatattatattattcagccacatattgacagcatctgttttatttgcctatggtaaagaattgaagcactgttaatttgctttttaaatcatgtaggcacaaagttatcgaactttagatttagaaatgaaactggaaatcattacactttccctttcctatccccaccctgttttggagagaaagagtgtgaggcttagagagttataaaactgttttaataccatgtctaagattaataactgaacaagtttctctttttactcgtgttaaagttgtactgccaattaacttaaaagaaagaaatatgcaatttctaatcctgatataggatatgggtatataaactctaacttgatgagtgaaacaaattaacttatttataatcagtttcatatctttatttattgagtgtctttaaataccccttacctttaaagtaagaaatattaaaatcaagcagaatataataatgaaaaattcttaagatatacttactaaaaacttatccttcggttaatacactgtatgtaggttgtacatacaatatgaaaaagtatatttttgtagcctacttttaaatccagaatagaggaggttaagaaggttgtgataaccatgagctcttttttttttttttttgagacaaggtcttactctgtttcccaggctggagtgccgtggcacaatcatagcttactgcagccttgaactcttgggctcaagcaagccttccacttcagccttccaagtagctgggaccacacctggctaatttttaagtatttttgtagagatgagttctcactacattgcccaggctagtcttgaacccctagccttaagcgatcctcccacctcagcctgcctaagtgctgggattacaggtgtgagccactgagcccagccctcttttatttcttttgatagtacactcataatcattaaactatcatttctggatgtgagattgtgcttttggattcttattttttctttataaaatactttttgttctcttactggagaaaacattgttggattataaatgatataacaaggaatgaggatatacatactataataacgattcagatatgttattttcatattttatttaactgtagccatgccacaataatttagagttttaaagaacaagtttgattgaaatctaaactttgtacaatcctgaattgagaagtttcctgtattttattatgacacaatatttacctaaaaatagagtaattatgaattgagaaaacatagctattaatttcatactcttatttgttaagtagattttgtctggaaaactgttcatatttaaaggagctttgtacctttgtattctttttgtttttccttgtttatataattttaaactctgtttatggatttgggattctaactatgctaaataataaattaaggcattgaatgaagtacctagacagtattttgattaattttattcccccattcttaatgtgcatgtaactggaaaattaagagtggcttccaagggatctactacaaaagtaaggttaatatgatctcttttaaaacactgaaggcgtgtagccagtgttgtcattaattctgcagtagatattttcagcacttatttacatgggaagttagagcagagtaagatgcacctgtaaagctaaatgccacttatttgcatatatataaaacgcaggatgaatttaccatagaaatataaagggtacttatagaaatgtattagaaaaatatatgaatttttaacttatatctagaagttaactttatacatttaactttaaatcattaatagtggtttaacaccataagcggatgtttatgcatcatcattttatgaacaaaagacattctaattttagaaataaagtgattcaaaagagaataaaatatcttactttttcttttaaaattaatttgtttagcgcattacatgataatagctcaagcttgtgtgatttttccctaaaaaattggtttataaatattacatttatagtatgaagaaattaatcatacatagtttatttatctaatttctaaatacccatggaagaaaatgaatttaatggaatgtagttgtgtattacttggtttcgagtgtgggaaaatttatatggtctttctaaaacagcactgtcagtagaaatacaatgtgagctacatatgcaattttaaattttctagtagccacattttaaaaagtaaatggatgcaatttattttgataatataatttaattagtctactatatttaaaattttatcatttcaacatgtaatcaatatgaaaattattaatgagatattttacatacttttttctgtaataagcctttgtaatcaggtatgtactttatatatacaacaaatcttctgatgctaaattttaactggaaatacttgatctgtgtttagcttttgtaaaatttactgttgaacaacgtggactaatgtgcctaagtggttccaaacatattttaaaatttgaagacaaataaaagggaactcaaagtaaattgggatacatacatacaacagaatactgagccattaaaaaatgatgaaatagtaaaattgggggaattttgatgatactaggatgatataatgaccaagagacaaatacaattttagtttggttgagagatgtgatcatcacgttgctgattttactatgtatagaggttatcttttcctttctaagattttgaaactttaattagttaacccacttacctagtttctattagctgtgtaactttctcttcctgttttttgttttgttttgttttgttttttgctttttaactgcagtattttgaggagtcttggagtagcaagctaatctttggaagaaaggaaaatataaacctgaaaactaacaatttaaagaacgtcttttcaggttgtcatttgaaaaatacttgatttctgatcactgatttgaattgagtgtcaaatatttgatatgttttgtaaattaggtgaagatgagtgagtaggttctaaactgcttgggtttaccgcactctggagcattgcagaagaatgtgatgttggaaggaagtgctgaaacataattattggcttgcctataggagggtgctacataattttagaaggtgtcaagaaattgacacagtctgaattagttctgttgagttgcaaaaaatgtaaagtttcttgattctgaaaataagaaatatgttcccagaaatctcatctagttaatgtgcttttaaaatcattgatgtctcttgttattacaataatagccattgaaagaatcttttttattagaatgttatttacaggtacgattagcttctatttaaataaattatttttatacttgatcttaggcaaaaggccaacaagtgatcagaataaattattttaagagaaaactaattataattgatatttggaattggaagcacaatttcctttagaacaattccacgaatggttgttttgattctcaaggcagcccacaaaagacagtttgaaacacaatttatgcagtgtcaatagtactgacctgactttggatcttggaggcaggggcttcaggtgatacccgagtggagtttttactccatttccattccgtaaggctataggcatttgaaagaggaaacttttctttggcaaccttccaccttcctttctacagaatatttcagtatttctagctcataggttttctaaaatattctctgtaatttattttgaaatggagtttttttatcgtttacagatatgagtaaaattagcctaatcagaatgttagttcctgaaaacattgacacgtaccttatccacatggcaattgagatccttaaacatggtcctgacagcggacttcaaccttcatgtgatgtcaacaaaaggagatgttttcccggttctgaagagatctgttcaagttctaagagaagcaaggaagaagtaggcatcaatactgaggtattaattatatatagaattttcataaagtgtcagtttgttcaatttgcatatcctagtactagaatgctgtatttttttgaactgttatgaattctgatatgattactttctctatgtgctacatttcctttgcttttcataaatatgatctgagaaaagtgattaaaaaaaagacagtaaaagggaggtttagtccatctgtttagcttattatgtagaatgtcagcttaaattttacctgtacctcatattgaccgtatagcctggaaaatctttcggaggtatagttaatggatttaagcatatggcagtttatgtagttaatgaaagtgaaaacaaattgtattataaatacctcccaaactggtttattatcattctatcattcttcatgctctgttagtatgatattgaatatctgaggtaccaggattattgttgcttgtggctctgagcatttcgtagtgcttttgcatgatgagagaaagattacaaatttagtattatgttagatggtacgttttattaaaatcaaatgcttcaaaaataattgctctgtgtatggcatgagataaatagcaatcagatatattgtttaataatatgactctattaaatgatggcataaatttgaaaatttgaccttcggtatcttccgggtctaaaattatatgactccattataaatattttggaaatgattaactaaaaaattgtttcaattcttagttggtaaattcaatgtggtagtaggtggtggtgattattttgtattagagaattaggaattacacttagttctaaggtaatctttataggatgtccagcaattaaacccctacttttttgaattgcttaaaaataagggaactgatctttttaaattctgtacttgagttacgtctgtatatatagtcatgtcctagataatctaatggaacttaattagttggaaatctttatattgtttataactgaactagctataagaggaacattaaagaaaacatattttgagtggaggtaatgaaatttagcttctaatgctcagccttttatttctgtaatctataccagatacctaagaccctcttattgtttcccagcttcaacctgtcagtatagaaaacggtgtaacttactattttttctcaatattgaagcacatttgtagtgaaatattattttaactatatattgccatttttgctttttccctatttcagtaacatttttcgctatttcagtaacattacatgtcaacaagagaatggtgggtattttggggggggttgggtggggagaaattttactaagcttgctagattctaaaaggtataccttatttggccccttttccccatttaggggaacaagggtgttggggctgggaagtagataagaggtgagtaagtcatccaaagcatatgtcttcattagcctccctgtatgaaaagctgatttctgtagagtgttggaggcctactttcagaatctgtcatatgttaacattcatcttctctactgacctgatttatatcccttagtctatttcattttataattatgacaaaggataaagtcattagaacaaattctttttattagttgacgtattgttgtgtttatatctcttgtgtttgttattaagatggaagctcaatcatgtccttgtttaacagaaaggtgatgtcttggcattgataattctgattcaatatccataggtacatggtggattctttaaatatttagtattcttttatttctggaaagttttcttaaatgatagtttttttaaaatttcatttctataaagttttcttaaatcatactttttagtgttttattccattacttcatatttcttcttcaggaactcctgctatacatgtatgttggatcttcattacccagcttcaatatttttcacttttcatgcattctttttatttcttcatttctctttaaatttttttcttccttttcaccttctatttctcttttaacataattgtatttatttctgtattccacatagcttagtattcacttattttaaaattattttaaaacgttttttagatttaaaaattctttttttatttatatatacatattttatttttaccaaaggagcaacactattaactgaagacttctataatttttttcttttatttctgattctttcttcggttttccccctcagttttgaacttttctaattttgatttgtgatgtccttttgtattttagataattttcctaatgttttccagctcatttggaaaggctacagttttattctgtacctaagcaagtctttctggtgtcaaagatttgaccttgatacttttcttttgctcattttcgtatgagattagttttcctgtactttcaaaagaaggcgtggttcaagatggctttcccaatttcacatctgtctctaatgtttttgtgtaatgtctaaaatatggaaacttggtttatgagatctactctgccatttttatctgggctttctcttccttttgtctctgttgtacctgtcctgcttggttttgatttaaccccagtggtttctcctgaatgtggagccttctcctagaaggcagcctcggctagtcccagggttcagagtagccagctgctctcttcacctaagagaccactgtggattccttgtactcacttgctattggcttggacaaaagccctcccattttcagatgctattatcagattaatctctcattaatctgtctttccagtgtatgcctgtgggctatcttggggttctcttgttatcagacacctccctgctggcctctgctttctcccgtacagatgtcagtactgtgcaggtcttaattgctgttggtggtttgcccctacattcttacagttttagtttcccaaggatacctttaaacttggttttattgtaaatgtcgacaatggattttgggttttactatctagttctgtcttaattctggaattcagaaagattaaaagctctgttgttgcagctgctgccacctcttcccagtaccctctcctcctatgtcatttttttcttcttatttttcttgactgtataagagagaatgtatgacatttcctgcttgaccgctgagtttgattataaattaaaatacacaatattttatacaaattgttttgtagaagatttatttacagatgctcattcacaggtaaaattgacttatgaaaatagttttcatgacaaatgtatcaggctcggtaactaaatatatggattgatcttgtttataaatgaaattaaatgtgaatgtaacttacatatttctgtatttgcttacatccgtatgtacacatataatcagcaaatgagttgatgtttcctattcgtaacttaatggtaatagcttggtaacagagttgggagtattaaaaagatgtaaagagccccttaaaattttgttgctgggaattttagtgttctactgatgaaggaaatagacactggaaggcgttgtttctattaggtaacttagatatcatactgaagacttcaaatacttattgttgacactcaaaagacacacttagtgtaagtaagcatttccccgcttttcccaatgaaataagatcattattataattccattataaatgctgatgatcatatttatagaaatatagaagataagacttgaaatgatattcgctaccaattaatgagtttgaagaagaaatcaggatgtgttttgctattttacatttattcttatttaactccaaagaattcagtgatgttatgtactattatttccatttctctgtgaagacgttgaagcttaagtaacacgcataataaggtcatacatttagcaagtggctcaattaaagttcaaacctggttctgcctggtttcaaagtctgtgctactccatggtattaggctacaacatgacttagggtttcttcctctgctctattgctgttcagatgtactcctcttttggcagagtgggagaaaatttttgcaatctatgcatctgacaaaggcccaatatccagaatctacaaggaacctaaacaaatttacaagaaaaaaaaaaaaacattaaaaagtgggcaaaggacttgatcagacacatctcaaaagaagacatttatgtagccaacaaacatatgaagaaaagctcaacatcactgatcattagaaagatgcaaaatgccttttctgtatgccaccttatatccccagtatttattatttctaagtcatagtatcttacagtgtatataagtctcatccgttcttttgattttctcttccctgcttgcaattgggtacctaggaacaaagttgcaatcttagccagttttttctttagcctttgctgatgtgtgaaaagcccttttttctaccctggatttctgtacttaagctggaacagctaagtttttaccttttttaaatataaagtttcagagtcttctgccaaggatcttttgctgttttcctactgttaaatatttcaaagccttttttaaacatagggaatataatcaaacatagcaagcagctgatgaacaatatctagatagtcttcattattgaaatggaataaatggtatttttgtattttaggctaacagacaccttgtaccttagataaggccaaccttctcataaaatccctcagttacttttattaataataaccaaattaactctggattccagggtgtactcatgatggaatgatttctctgtcatgttatcctgaggatctagtactctgagataacataagtgtatgacactttaggcttatgaaacacttagctacttaaattatttaattttttttcatgtgcagatggtattgtacccaaacactacctttgtgtgtgtgtgtgtgtgtgcctgtgtgtgtgtttttgagacagggtcttactctgctcaggctggagtgcagtggcgtgattatagctcactacagccttgacctcctgggctccagtgatcctgccaaagtgttgggattgcaggcgtgagccacctcacccagccttaaattatttttttttcaaggatgtttaacctgagggttagaggctctttggcacgtgagctgctgaaatgtgtgtgaaagtgttgtgcacgtgtatgtttctctttttttctgggaagtggatctgtagtgattcttagatgagtctatgagacaagaaacttttatttttttcatttatttagcgaatgtttgttaagcgtactatgccttggccactctacagggtgctgattggaccagtctgtctacctaccgttgtagatgttagaagctatattcttttcacatgcctaatataactctttgtgtatgtatacatgcccaggcatgttccttcctcagaacattaaattcaccattttggtcaactcaaagcaagtacaccatgggacacagatctgaaataatgtccagatttttacttactgaatgaggtgtgttgagtgtataagactacatgatgagatggcaagtaattgcctgaagaaatgatgtagtgattttgtgtgtcttatatttatttactttttgatccagaaataaattatatagataccactattttgtttggatgggggagaaaggatgggtgtgtattcaggaacttatgttacttttttgcaactaataccccttctcagtagtacaaagatttgatttctttttctttctatttcctacagacttcatctgcagagagaaagagacgattacctgtgtggtttgccaaaggaagtgataccagcaagaaattaatggacaaaacgaaaaggggaggtctttttagttaagctggcaattaccagaacaattatgtttcttgctgtattataagaggatagctatattttatttctgaagagtaaggagtagtattttggcttaaaaatcattctaattacaaagttcactgtttattgaagaactggcatcttaaatcagccttccgcaattcatgtagtttctgggtcttctgggagcctacgtgagtacatcacctaacagaatattaaattagacttcctgtaagattgctttaagaaactgttactgtcctgttttctaatctctttattaaaacagtgtatttggaaaatgttatgtgctctgatttgatatagataacagattagtagttacatggtaattatgtgatataaaatattcatatattatcaaaattctgttttgtaaatgtaagaaagcatagttattttacaaattgtttttactgtcttttgaagaagttcttaaatacgttgttaaatggtattagttgaccagggcagtgaaaatgaaaccgcattttgggtgccattaaatagggaaaaaacatgtaaaaaatgtaaaatggagaccaattgcactaggcaagtgtatattttgtattttatatacaatttctattatttttcaagtaataaaacaatgtttttcatactgaatattatatatatattttttagctttcatttacttaattattttaagtacctttatttttccaggatgtcagaatttgattctaatctctcttatgtagcacatgtgacttaatttaaaacctatactgtgacacagagttgggtaaacgatgattatttaactttaagcagttcaccatccatttcaaagcctttgattggcttttttgtaaataaaaataacttgttaagaaacaaatatatctgtcatagaagaactagaaaatccagggaagtgagaaaaatgaaaataaaaatcattcatagttttactagtagctaatcacagtcaacctcttttgtgtatcccaccagacttttttatattcatttgtttttagttaaaatataaaagtctcgtatattcccatttttctgcattgcattaccagaaggtagtggcgcctattaaatatgtgatatgttgttgtccagccatggcttctgcatttgcatgcttttgtgtgtgcatctgcaataccctgtgaatatcctgtgtgatggagtggcaagtacgcacagacacgtctgctgcatgcctaggtacgaggctgtctccaggagaagcacttgtttgattatttgagttgccaattgaatttgctgctttttttcatggcttgccattttcactgaaaagaatgactaatgaaaaacgatgattggttattagatttggatgtttggcagacattttctcaaaattgaactaagttggcctcttcacggaaaacaactggtatttgttgtgccaatgataaaattggagatttctagcaaaatgtataattttggaaaagttgtgttcctccactggaagcttgacagctttccttaacataaagacttctctttctcttcgctttcactactactactactaattcttcttctgattcttcttcttctccttcttccttcttccttccttcctcctcctcctccttcttcttcctcttcctcttcttctttctctctttccttccttcccttcccttccccttccttccttccttccttccttcctccctccctccctccctccctccctccctcctttctttttctttctctttctttctttctttctctctctctctctctttctttctttttctttctctttttctttctttcaagcagtcctcccgcctcagtcccccaaaatagtgggattacaggtgtgagccaccatgcacagccttacataaagccttttctaatgagatggatagtaattaacaaatgtgagtttttgatattatataaagattttttctgtgtttcgaagatccgtataactcagtgaatcagtatgttctggatgactaatatgtgatgttaagaaatcatgactgaggccgggcgcggtggctcacgcctgtaatcccagcactttgggaggccgaggcgggcggatcacgagatcaggagatcgagaccaccctggccaacatggtgaaaccccgtctctactaaaaatacaaaaattagctgggtgtgttggtgcgtgcctataatcccagctactcgggaggctgaggcaggagaatcgcttgaactcaggaggcggagattgcagtgagctgagactgcgccactgcaccccagcctggcgacagagcaagactccgtctcaaaaataaaaaaagaaatcatgactgggtaaaagatctgttcagagtacaagatggaccaatggatttgatatatttgaatataacagagtatgaaaaagtttattgatatagtttcagattacacactgcaactaatctttaagaaactattacttgtccactttttggtaaaatttcagagaacaatgtccaccattatctgaacaggctattaaaatactcttctcttttccaactacgtgcctgtgcaaagtcagatttttttcatatacttcagccaaaacagcatatcaaaatggattgaatgcagaagtagatctgagaatacagccacttttgttaagccagacaatgagatttgcaaaatgtaaacaatgctgctgttctcagtttttaaaaatatgttttttaaaagtatttatgttaatgtgtacttggtttactactgctatttttaaataaaacaagaaacatttttaaatgtctgttttaatttctaaagtggtagtgatagatataacccatattaataaaagctctttggggtcctcagtgatttttttttaagagtatggaagggttctcagacctaagagattgagaaatgctgatgtaatgttttattataaaggtgtaccatgaattatgtaccttacttcatattgttggacattaaagttgctttcagtttttttgttttaaa

SEQ ID NO: 7 - DNA, 20 bp, Artificial Sequence
  (-)10-20-A ASO for WRN Exon27
aguuuucgaacuaaaaaaua

SEQ ID NO: 8 - DNA, 20 bp, Artificial Sequence
  (-)5-20-A ASO for WRN Exon27
gauacaguuuucgaacuaaa

SEQ ID NO: 9 - DNA, 20 bp, Artificial Sequence
  1-20-A ASO for WRN Exon27
ccgaagauacaguuuucgaa

SEQ ID NO: 10 - DNA, 20 bp, Artificial Sequence
  2-20-A ASO for WRN Exon27
cccgaagauacaguuuucga

SEQ ID NO: 11 - DNA, 20 bp, Artificial Sequence
  3-20-A ASO for WRN Exon27
gcccgaagauacaguuuucg

SEQ ID NO: 12 - DNA, 20 bp, Artificial Sequence
  4-20-A ASO for WRN Exon27
ugcccgaagauacaguuuuc

SEQ ID NO: 13 - DNA, 20 bp, Artificial Sequence
  5-20-A ASO for WRN Exon27
gugcccgaagauacaguuuu

SEQ ID NO: 14 - DNA, 20 bp, Artificial Sequence
  6-20-A ASO for WRN Exon27
ggugcccgaagauacaguuu

SEQ ID NO: 15 - DNA, 20 bp, Artificial Sequence
  7-20-A ASO for WRN Exon27
uggugcccgaagauacaguu

SEQ ID NO: 16 - DNA, 20 bp, Artificial Sequence
  8-20-A ASO for WRN Exon27
uuggugcccgaagauacagu

SEQ ID NO: 17 - DNA, 20 bp, Artificial Sequence
  8-20-B ASO for WRN Exon27
  modified_base (9)..(9): m5c
tuggugcccgaagatacagu

SEQ ID NO: 18 - DNA, 20 bp, Artificial Sequence
  8-20-C ASO for WRN Exon27
  modified_base (9)..(9): m5c
  modified_base (17)..(17): m5c
ttggtgcccgaagauacagu

SEQ ID NO: 19 - DNA, 20 bp, Artificial Sequence
  9-20-A ASO for WRN Exon27
uuuggugcccgaagauacag

SEQ ID NO: 20 - DNA, 20 bp, Artificial Sequence
  10-20-A ASO for WRN Exon27
cuuuggugcccgaagauaca

SEQ ID NO: 21 - DNA, 20 bp, Artificial Sequence
  11-20-A ASO for WRN Exon27
ucuuuggugcccgaagauac

SEQ ID NO: 22 - DNA, 20 bp, Artificial Sequence
  12-20-A ASO for WRN Exon27
cucuuuggugcccgaagaua

SEQ ID NO: 23 - DNA, 20 bp, Artificial Sequence
  13-20-A ASO for WRN Exon27
gcucuuuggugcccgaagau

SEQ ID NO: 24 - DNA, 20 bp, Artificial Sequence
  14-20-A ASO for WRN Exon27
ugcucuuuggugcccgaaga

SEQ ID NO: 25 - DNA, 20 bp, Artificial Sequence
  15-20-A ASO for WRN Exon27
augcucuuuggugcccgaag

SEQ ID NO: 26 - DNA, 20 bp, Artificial Sequence
  16-20-A ASO for WRN Exon27
aaugcucuuuggugcccgaa

SEQ ID NO: 27 - DNA, 20 bp, Artificial Sequence
  17-20-A ASO for WRN Exon27
caaugcucuuuggugcccga

SEQ ID NO: 28 - DNA, 20 bp, Artificial Sequence
  18-20-A ASO for WRN Exon27
acaaugcucuuuggugcccg

SEQ ID NO: 29 - DNA, 20 bp, Artificial Sequence
  19-20-A ASO for WRN Exon27
aacaaugcucuuuggugccc

SEQ ID NO: 30 - DNA, 20 bp, Artificial Sequence
  20-20-A ASO for WRN Exon27
uaacaaugcucuuuggugcc

SEQ ID NO: 31 - DNA, 20 bp, Artificial Sequence
  21-20-A ASO for WRN Exon27
auaacaaugcucuuuggugc

SEQ ID NO: 32 - DNA, 20 bp, Artificial Sequence
  22-20-A ASO for WRN Exon27
uauaacaaugcucuuuggug

SEQ ID NO: 33 - DNA, 20 bp, Artificial Sequence
  23-20-A ASO for WRN Exon27
uuauaacaaugcucuuuggu

SEQ ID NO: 34 - DNA, 20 bp, Artificial Sequence
  24-20-A ASO for WRN Exon27
auuauaacaaugcucuuugg

SEQ ID NO: 35 - DNA, 20 bp, Artificial Sequence
  25-20-A ASO for WRN Exon27
gauuauaacaaugcucuuug

SEQ ID NO: 36 - DNA, 20 bp, Artificial Sequence
  26-20-A ASO for WRN Exon27
ugauuauaacaaugcucuuu

SEQ ID NO: 37 - DNA, 20 bp, Artificial Sequence
  27-20-A ASO for WRN Exon27
uugauuauaacaaugcucuu

SEQ ID NO: 38 - DNA, 20 bp, Artificial Sequence
  28-20-A ASO for WRN Exon27
cuugauuauaacaaugcucu

SEQ ID NO: 39 - DNA, 20 bp, Artificial Sequence
  29-20-A ASO for WRN Exon27
acuugauuauaacaaugcuc

SEQ ID NO: 40 - DNA, 20 bp, Artificial Sequence
  30-20-A ASO for WRN Exon27
uacuugauuauaacaaugcu

SEQ ID NO: 41 - DNA, 20 bp, Artificial Sequence
  31-20-A ASO for WRN Exon27
guacuugauuauaacaaugc

SEQ ID NO: 42 - DNA, 20 bp, Artificial Sequence
  32-20-A ASO for WRN Exon27
gguacuugauuauaacaaug

SEQ ID NO: 43 - DNA, 20 bp, Artificial Sequence
  33-20-A ASO for WRN Exon27
ugguacuugauuauaacaau

SEQ ID NO: 44 - DNA, 20 bp, Artificial Sequence
  34-20-A ASO for WRN Exon27
cugguacuugauuauaacaa

SEQ ID NO: 45 - DNA, 20 bp, Artificial Sequence
  35-20-A ASO for WRN Exon27
acugguacuugauuauaaca

SEQ ID NO: 46 - DNA, 20 bp, Artificial Sequence
  36-20-A ASO for WRN Exon27
aacugguacuugauuauaac

SEQ ID NO: 47 - DNA, 20 bp, Artificial Sequence
  37-20-A ASO for WRN Exon27
caacugguacuugauuauaa

SEQ ID NO: 48 - DNA, 20 bp, Artificial Sequence
  38-20-A ASO for WRN Exon27
ucaacugguacuugauuaua

SEQ ID NO: 49 - DNA, 20 bp, Artificial Sequence
  39-20-A ASO for WRN Exon27
uucaacugguacuugauuau

SEQ ID NO: 50 - DNA, 20 bp, Artificial Sequence
  40-20-A ASO for WRN Exon27
auucaacugguacuugauua

SEQ ID NO: 51 - DNA, 20 bp, Artificial Sequence
  41-20-A ASO for WRN Exon27
aauucaacugguacuugauu

SEQ ID NO: 52 - DNA, 20 bp, Artificial Sequence
  46-20-A ASO for WRN Exon27
uacuuaauucaacugguacu

SEQ ID NO: 53 - DNA, 20 bp, Artificial Sequence
  51-20-A ASO for WRN Exon27
cucuguacuuaauucaacug

SEQ ID NO: 54 - DNA, 20 bp, Artificial Sequence
  56-20-A ASO for WRN Exon27
uucuucucuguacuuaauuc

SEQ ID NO: 55 - DNA, 20 bp, Artificial Sequence
  62-20-A ASO for WRN Exon27
caaaccuucuucucuguacu

SEQ ID NO: 56 - DNA, 20 bp, Artificial Sequence
  63-20-A ASO for WRN Exon27
acaaaccuucuucucuguac

SEQ ID NO: 57 - DNA, 20 bp, Artificial Sequence
  66-20-A ASO for WRN Exon27
aaaacaaaccuucuucucug

SEQ ID NO: 58 - DNA, 20 bp, Artificial Sequence
  70-20-A ASO for WRN Exon27
cuuuaaaacaaaccuucuuc

SEQ ID NO: 59 - DNA, 15 bp, Artificial Sequence
  1-15-A ASO for WRN Exon27
gauacaguuuucgaa

SEQ ID NO: 60 - DNA, 15 bp, Artificial Sequence
  2-15-A ASO for WRN Exon27
agauacaguuuucga

SEQ ID NO: 61 - DNA, 15 bp, Artificial Sequence
  3-15-A ASO for WRN Exon27
aagauacaguuuucg

SEQ ID NO: 62 - DNA, 15 bp, Artificial Sequence
  4-15-A ASO for WRN Exon27
gaagauacaguuuuc

SEQ ID NO: 63 - DNA, 15 bp, Artificial Sequence
  5-15-A ASO for WRN Exon27
cgaagauacaguuuu

SEQ ID NO: 64 - DNA, 15 bp, Artificial Sequence
  6-15-A ASO for WRN Exon27
ccgaagauacaguuu

SEQ ID NO: 65 - DNA, 15 bp, Artificial Sequence
  7-15-A ASO for WRN Exon27
cccgaagauacaguu

SEQ ID NO: 66 - DNA, 15 bp, Artificial Sequence
  8-15-A ASO for WRN Exon27
gcccgaagauacagu

SEQ ID NO: 67 - DNA, 15 bp, Artificial Sequence
  9-15-A ASO for WRN Exon27
ugcccgaagauacag

SEQ ID NO: 68 - DNA, 15 bp, Artificial Sequence
  10-15-A ASO for WRN Exon27
gugcccgaagauaca

SEQ ID NO: 69 - DNA, 15 bp, Artificial Sequence
  11-15-A ASO for WRN Exon27
ggugcccgaagauac

SEQ ID NO: 70 - DNA, 15 bp, Artificial Sequence
  12-15-A ASO for WRN Exon27
uggugcccgaagaua

SEQ ID NO: 71 - DNA, 15 bp, Artificial Sequence
  13-15-A ASO for WRN Exon27
uuggugcccgaagau

SEQ ID NO: 72 - DNA, 15 bp, Artificial Sequence
  14-15-A ASO for WRN Exon27
uuuggugcccgaaga

SEQ ID NO: 73 - DNA, 15 bp, Artificial Sequence
  15-15-A ASO for WRN Exon27
cuuuggugcccgaag

SEQ ID NO: 74 - DNA, 15 bp, Artificial Sequence
  16-15-A ASO for WRN Exon27
ucuuuggugcccgaa

SEQ ID NO: 75 - DNA, 15 bp, Artificial Sequence
  17-15-A ASO for WRN Exon27
cucuuuggugcccga

SEQ ID NO: 76 - DNA, 15 bp, Artificial Sequence
  18-15-A ASO for WRN Exon27
gcucuuuggugcccg

SEQ ID NO: 77 - DNA, 15 bp, Artificial Sequence
  19-15-A ASO for WRN Exon27
ugcucuuuggugccc

SEQ ID NO: 78 - DNA, 15 bp, Artificial Sequence
  20-15-A ASO for WRN Exon27
augcucuuuggugcc

SEQ ID NO: 79 - DNA, 15 bp, Artificial Sequence
  21-15-A ASO for WRN Exon27
aaugcucuuuggugc

SEQ ID NO: 80 - DNA, 25 bp, Artificial Sequence
  1-25-A ASO for WRN Exon27
ggugcccgaagauacaguuuucgaa

SEQ ID NO: 81 - DNA, 25 bp, Artificial Sequence
  3-25-A ASO for WRN Exon27
uuggugcccgaagauacaguuuucg

SEQ ID NO: 82 - DNA, 25 bp, Artificial Sequence
  5-25-A ASO for WRN Exon27
cuuuggugcccgaagauacaguuuu

SEQ ID NO: 83 - DNA, 25 bp, Artificial Sequence
  7-25-A ASO for WRN Exon27
cucuuuggugcccgaagauacaguu

SEQ ID NO: 84 - DNA, 25 bp, Artificial Sequence
  9-25-A ASO for WRN Exon27
ugcucuuuggugcccgaagauacag

SEQ ID NO: 85 - DNA, 25 bp, Artificial Sequence
  11-25-A ASO for WRN Exon27
aaugcucuuuggugcccgaagauac

SEQ ID NO: 86 - DNA, 25 bp, Artificial Sequence
  15-25-A ASO for WRN Exon27
  modified_base (4)..(4): m5c
  modified_base (9)..(9): m5c
  modified_base (11)..(11): m5c
  modified_base (19)..(21): m5c
taacaatgctctttggtgcccgaag

SEQ ID NO: 87 - DNA, 24 bp, Artificial Sequence
  15-24-A ASO for WRN Exon27
  modified_base (3)..(3): m5c
  modified_base (8)..(8): m5c
  modified_base (10)..(10): m5c
  modified_base (18)..(20): m5c
aacaatgctctttggtgcccgaag

SEQ ID NO: 88 - DNA, 23 bp, Artificial Sequence
  15-23-A ASO for WRN Exon27
  modified_base (2)..(2): m5c
  modified_base (7)..(7): m5c
  modified_base (9)..(9): m5c
  modified_base (17)..(19): m5c
acaatgctctttggtgcccgaag

SEQ ID NO: 89 - DNA, 22 bp, Artificial Sequence
  15-22-A ASO for WRN Exon27
  modified_base (1)..(1): m5c
  modified_base (6)..(6): m5c
  modified_base (8)..(8): m5c
  modified_base (16)..(18): m5c
caatgctctttggtgcccgaag

SEQ ID NO: 90 - DNA, 21 bp, Artificial Sequence
  15-21-A ASO for WRN Exon27
  modified_base (5)..(5): m5c
  modified_base (7)..(7): m5c
  modified_base (15)..(17): m5c
aatgctctttggtgcccgaag

SEQ ID NO: 91 - DNA, 19 bp, Artificial Sequence
  15-19-A ASO for WRN Exon27
  modified_base (3)..(3): m5c
  modified_base (5)..(5): m5c
  modified_base (13)..(15): m5c
tgctctttggtgcccgaag

SEQ ID NO: 92 - DNA, 18 bp, Artificial Sequence
  15-18-A ASO for WRN Exon27
  modified_base (2)..(2): m5c
  modified_base (4)..(4): m5c
  modified_base (12)..(14): m5c
gctctttggtgcccgaag

SEQ ID NO: 93 - DNA, 17 bp, Artificial Sequence
  15-17-A ASO for WRN Exon27
  modified_base (1)..(1): m5c
  modified_base (3)..(3): m5c
  modified_base (11)..(13): m5c
ctctttggtgcccgaag

SEQ ID NO: 94 - DNA, 16 bp, Artificial Sequence
  15-16-A ASO for WRN Exon27
  modified_base (2)..(2): m5c
  modified_base (10)..(12): m5c
tctttggtgcccgaag

SEQ ID NO: 95 - DNA, 19 bp, Artificial Sequence
  16-19-A ASO for WRN Exon27
  modified_base (4)..(4): m5c
  modified_base (6)..(6): m5c
  modified_base (14)..(16): m5c
atgctctttggtgcccgaa

SEQ ID NO: 96 - DNA, 18 bp, Artificial Sequence
  16-18-A ASO for WRN Exon27
  modified_base (3)..(3): m5c
  modified_base (5)..(5): m5c
  modified_base (13)..(15): m5c
tgctctttggtgcccgaa

SEQ ID NO: 97 - DNA, 17 bp, Artificial Sequence
  16-17-A ASO for WRN Exon27
  modified_base (2)..(2): m5c
  modified_base (4)..(4): m5c
  modified_base (12)..(14): m5c
gctctttggtgcccgaa

SEQ ID NO: 98 - DNA, 16 bp, Artificial Sequence
  16-16-A ASO for WRN Exon27
  modified_base (1)..(1): m5c
  modified_base (3)..(3): m5c
  modified_base (11)..(13): m5c
ctctttggtgcccgaa

SEQ ID NO: 99 - DNA, 19 bp, Artificial Sequence
  10-19-A ASO for WRN Exon27
  modified_base (8)..(10): m5c
  modified_base (18)..(18): m5c
tttggtgcccgaagataca

SEQ ID NO: 100 - DNA, 18 bp, Artificial Sequence
  10-18-A ASO for WRN Exon27
  modified_base (7)..(9): m5c
  modified_base (17)..(17): m5c
ttggtgcccgaagataca

SEQ ID NO: 101 - DNA, 17 bp, Artificial Sequence
  10-17-A ASO for WRN Exon27
  modified_base (6)..(8): m5c
  modified_base (16)..(16): m5c
tggtgcccgaagataca

SEQ ID NO: 102 - DNA, 16 bp, Artificial Sequence
  10-16-A ASO for WRN Exon27
  modified_base (5)..(7): m5c
  modified_base (15)..(15): m5c
ggtgcccgaagataca

SEQ ID NO: 103 - DNA, 19 bp, Artificial Sequence
  12-19-A ASO for WRN Exon27
  modified_base (2)..(2): m5c
  modified_base (10)..(12): m5c
tctttggtgcccgaagata

SEQ ID NO: 104 - DNA, 18 bp, Artificial Sequence
  12-18-A ASO for WRN Exon27
  modified_base (1)..(1): m5c
  modified_base (9)..(11): m5c
ctttggtgcccgaagata

SEQ ID NO: 105 - DNA, 20 bp, Artificial Sequence
  10-20-B and 10-20-C ASO for WRN Exon27
  modified_base (1)..(1): m5c
  modified_base (9)..(11): m5c
  modified_base (19)..(19): m5c
ctttggtgcccgaagataca

SEQ ID NO: 106 - DNA, 20 bp, Artificial Sequence
  10-20-D ASO for WRN Exon27
ctttggtgcccgaagataca

SEQ ID NO: 107 - DNA, 20 bp, Artificial Sequence
  1-20-B ASO for WRN Exon27
  modified_base (1)..(2): m5c
  modified_base (10)..(10): m5c
  modified_base (17)..(17): m5c
ccgaagatacagttttcgaa

SEQ ID NO: 108 - DNA, 20 bp, Artificial Sequence
  12-20-B and 12-20-C ASO for WRN Exon27
  modified_base (1)..(1): m5c
  modified_base (3)..(3): m5c
  modified_base (11)..(13): m5c
ctctttggtgcccgaagata

SEQ ID NO: 109 - DNA, 20 bp, Artificial Sequence
  12-20-D ASO for WRN Exon27
ctctttggtgcccgaagata

SEQ ID NO: 110 - DNA, 20 bp, Artificial Sequence
  14-20-B and 14-20-C ASO for WRN Exon27
  modified_base (3)..(3): m5c
  modified_base (5)..(5): m5c
  modified_base (13)..(15): m5c
tgctctttggtgcccgaaga

SEQ ID NO: 111 - DNA, 20 bp, Artificial Sequence
  14-20-D ASO for WRN Exon27
tgctctttggtgcccgaaga

SEQ ID NO: 112 - DNA, 20 bp, Artificial Sequence
  15-20-B ASO for WRN Exon27
  modified_base (4)..(4): m5c
  modified_base (6)..(6): m5c
  modified_base (14)..(16): m5c
atgctctttggtgcccgaag

SEQ ID NO: 113 - DNA, 20 bp, Artificial Sequence
  15-20-C ASO for WRN Exon27
atgctctttggtgcccgaag

SEQ ID NO: 114 - DNA, 20 bp, Artificial Sequence
  16-20-B ASO for WRN Exon27
  modified_base (5)..(5): m5c
  modified_base (7)..(7): m5c
  modified_base (15)..(17): m5c
aatgctctttggtgcccgaa

SEQ ID NO: 115 - DNA, 20 bp, Artificial Sequence
  16-20-C ASO for WRN Exon27
aatgctctttggtgcccgaa

SEQ ID NO: 116 - DNA, 20 bp, Artificial Sequence
  17-20-B ASO for WRN Exon27
  modified_base (1)..(1): m5c
  modified_base (6)..(6): m5c
  modified_base (8)..(8): m5c
  modified_base (16)..(18): m5c
caatgctctttggtgcccga

SEQ ID NO: 117 - DNA, 20 bp, Artificial Sequence
  17-20-C ASO for WRN Exon27
caatgctctttggtgcccga

SEQ ID NO: 118 - DNA, 20 bp, Artificial Sequence
  18-20-B ASO for WRN Exon27
  modified_base (2)..(2): m5c
  modified_base (7)..(7): m5c
  modified_base (9)..(9): m5c
  modified_base (17)..(19): m5c
acaatgctctttggtgcccg

SEQ ID NO: 119 - DNA, 20 bp, Artificial Sequence
  19-20-B ASO for WRN Exon27
  modified_base (3)..(3): m5c
  modified_base (8)..(8): m5c
  modified_base (10)..(10): m5c
  modified_base (18)..(20): m5c
aacaatgctctttggtgccc

SEQ ID NO: 120 - DNA, 20 bp, Artificial Sequence
  21-20-B ASO for WRN Exon27
  modified_base (5)..(5): m5c
  modified_base (10)..(10): m5c
  modified_base (12)..(12): m5c
  modified_base (20)..(20): m5c
ataacaatgctctttggtgc

SEQ ID NO: 121 - DNA, 20 bp, Artificial Sequence
  25-20-B ASO for WRN Exon27
  modified_base (9)..(9): m5c
  modified_base (14)..(14): m5c
  modified_base (16)..(16): m5c
gattataacaatgctctttg

SEQ ID NO: 122 - DNA, 20 bp, Artificial Sequence
  29-20-B ASO for WRN Exon27
  modified_base (2)..(2): m5c
  modified_base (13)..(13): m5c
  modified_base (18)..(18): m5c
  modified_base (20)..(20): m5c
acttgattataacaatgctc

SEQ ID NO: 123 - DNA, 20 bp, Artificial Sequence
  30-20-B ASO for WRN Exon27
  modified_base (3)..(3): m5c
  modified_base (14)..(14): m5c
  modified_base (19)..(19): m5c
tacttgattataacaatgct

SEQ ID NO: 124 - DNA, 20 bp, Artificial Sequence
  31-20-B ASO for WRN Exon27
  modified_base (4)..(4): m5c
  modified_base (15)..(15): m5c
  modified_base (20)..(20): m5c
gtacttgattataacaatgc

SEQ ID NO: 125 - DNA, 20 bp, Artificial Sequence
  34-20-B ASO for WRN Exon27
  modified_base (1)..(1): m5c
  modified_base (7)..(7): m5c
  modified_base (18)..(18): m5c
ctggtacttgattataacaa

SEQ ID NO: 126 - DNA, 20 bp, Artificial Sequence
  36-20-B ASO for WRN Exon27
  modified_base (3)..(3): m5c
  modified_base (9)..(9): m5c
  modified_base (20)..(20): m5c
aactggtacttgattataac

SEQ ID NO: 127 - DNA, 20 bp, Artificial Sequence
  46-20-B ASO for WRN Exon27
  modified_base (3)..(3): m5c
  modified_base (10)..(10): m5c
  modified_base (13)..(13): m5c
  modified_base (19)..(19): m5c
tacttaattcaactggtact

SEQ ID NO: 128 - DNA, 20 bp, Artificial Sequence
  51-20-B ASO for WRN Exon27
  modified_base (1)..(1): m5c
  modified_base (3)..(3): m5c
  modified_base (8)..(8): m5c
  modified_base (15)..(15): m5c
  modified_base (18)..(18): m5c
ctctgtacttaattcaactg

SEQ ID NO: 129 - DNA, 20 bp, Artificial Sequence
  6-20-B ASO for WRN Exon27
  modified_base (5)..(7): m5c
  modified_base (15)..(15): m5c
ggtgcccgaagatacagttt

SEQ ID NO: 130 - DNA, 20 bp, Artificial Sequence
  6-20-C ASO for WRN Exon27
ggtgcccgaagatacagttt

SEQ ID NO: 131 - DNA, 20 bp, Artificial Sequence
  7-20-B ASO for WRN Exon27
  modified_base (6)..(8): m5c
  modified_base (16)..(16): m5c
tggtgcccgaagatacagtt

SEQ ID NO: 132 - DNA, 20 bp, Artificial Sequence
  7-20-C ASO for WRN Exon27
tggtgcccgaagatacagtt

SEQ ID NO: 133 - DNA, 20 bp, Artificial Sequence
  8-20-D and 8-20-E ASO for WRN Exon27
  modified_base (7)..(9): m5c
  modified_base (17)..(17): m5c
ttggtgcccgaagatacagt

SEQ ID NO: 134 - DNA, 20 bp, Artificial Sequence
  8-20-F ASO for WRN Exon27
ttggtgcccgaagatacagt

SEQ ID NO: 135 - DNA, 20 bp, Artificial Sequence
  9-20-B ASO for WRN Exon27
  modified_base (8)..(10): m5c
  modified_base (18)..(18): m5c
tttggtgcccgaagatacag

SEQ ID NO: 136 - DNA, 20 bp, Artificial Sequence
  9-20-C ASO for WRN Exon27
tttggtgcccgaagatacag

SEQ ID NO: 137 - DNA, 20 bp, Artificial Sequence
  9-20-D ASO for WRN Exon27
tttcgtcccccaacatagag

SEQ ID NO: 138 - DNA, 20 bp, Artificial Sequence
  (-)10-20 ASO for WRN Exon27
agttttcgaactaaaaaata

SEQ ID NO: 139 - DNA, 20 bp, Artificial Sequence
  (-)5-20 ASO for WRN Exon27
gatacagttttcgaactaaa

SEQ ID NO: 140 - DNA, 20 bp, Artificial Sequence
  1-20 ASO for WRN Exon27
ccgaagatacagttttcgaa

SEQ ID NO: 141 - DNA, 20 bp, Artificial Sequence
  2-20 ASO for WRN Exon27
cccgaagatacagttttcga

SEQ ID NO: 142 - DNA, 20 bp, Artificial Sequence
  3-20 ASO for WRN Exon27
gcccgaagatacagttttcg

SEQ ID NO: 143 - DNA, 20 bp, Artificial Sequence
  4-20 ASO for WRN Exon27
tgcccgaagatacagttttc

SEQ ID NO: 144 - DNA, 20 bp, Artificial Sequence
  5-20 ASO for WRN Exon27
gtgcccgaagatacagtttt

SEQ ID NO: 145 - DNA, 20 bp, Artificial Sequence
  6-20 ASO for WRN Exon27
ggtgcccgaagatacagttt

SEQ ID NO: 146 - DNA, 20 bp, Artificial Sequence
  7-20 ASO for WRN Exon27
tggtgcccgaagatacagtt

SEQ ID NO: 147 - DNA, 20 bp, Artificial Sequence
  8-20 ASO for WRN Exon27
ttggtgcccgaagatacagt

SEQ ID NO: 148 - DNA, 20 bp, Artificial Sequence
  9-20 ASO for WRN Exon27
tttggtgcccgaagatacag

SEQ ID NO: 149 - DNA, 20 bp, Artificial Sequence
  10-20 ASO for WRN Exon27
ctttggtgcccgaagataca

SEQ ID NO: 150 - DNA, 20 bp, Artificial Sequence
  11-20 ASO for WRN Exon27
tctttggtgcccgaagatac

SEQ ID NO: 151 - DNA, 20 bp, Artificial Sequence
  12-20 ASO for WRN Exon27
ctctttggtgcccgaagata

SEQ ID NO: 152 - DNA, 20 bp, Artificial Sequence
  13-20 ASO for WRN Exon27
gctctttggtgcccgaagat

SEQ ID NO: 153 - DNA, 20 bp, Artificial Sequence
  14-20 ASO for WRN Exon27
tgctctttggtgcccgaaga

SEQ ID NO: 154 - DNA, 20 bp, Artificial Sequence
  15-20 ASO for WRN Exon27
atgctctttggtgcccgaag

SEQ ID NO: 155 - DNA, 20 bp, Artificial Sequence
  16-20 ASO for WRN Exon27
aatgctctttggtgcccgaa

SEQ ID NO: 156 - DNA, 20 bp, Artificial Sequence
  17-20 ASO for WRN Exon27
caatgctctttggtgcccga

SEQ ID NO: 157 - DNA, 20 bp, Artificial Sequence
  18-20 ASO for WRN Exon27
acaatgctctttggtgcccg

SEQ ID NO: 158 - DNA, 20 bp, Artificial Sequence
  19-20 ASO for WRN Exon27
aacaatgctctttggtgccc

SEQ ID NO: 159 - DNA, 20 bp, Artificial Sequence
  20-20 ASO for WRN Exon27
taacaatgctctttggtgcc

SEQ ID NO: 160 - DNA, 20 bp, Artificial Sequence
  21-20 ASO for WRN Exon27
ataacaatgctctttggtgc

SEQ ID NO: 161 - DNA, 20 bp, Artificial Sequence
  22-20 ASO for WRN Exon27
tataacaatgctctttggtg

SEQ ID NO: 162 - DNA, 20 bp, Artificial Sequence
  23-20 ASO for WRN Exon27
ttataacaatgctctttggt

SEQ ID NO: 163 - DNA, 20 bp, Artificial Sequence
  24-20 ASO for WRN Exon27
attataacaatgctctttgg

SEQ ID NO: 164 - DNA, 20 bp, Artificial Sequence
  25-20 ASO for WRN Exon27
gattataacaatgctctttg

SEQ ID NO: 165 - DNA, 20 bp, Artificial Sequence
  26-20 ASO for WRN Exon27
tgattataacaatgctcttt

SEQ ID NO: 166 - DNA, 20 bp, Artificial Sequence
  27-20 ASO for WRN Exon27
ttgattataacaatgctctt

SEQ ID NO: 167 - DNA, 20 bp, Artificial Sequence
  28-20 ASO for WRN Exon27
cttgattataacaatgctct

SEQ ID NO: 168 - DNA, 20 bp, Artificial Sequence
  29-20 ASO for WRN Exon27
acttgattataacaatgctc

SEQ ID NO: 169 - DNA, 20 bp, Artificial Sequence
  30-20 ASO for WRN Exon27
tacttgattataacaatgct

SEQ ID NO: 170 - DNA, 20 bp, Artificial Sequence
  31-20 ASO for WRN Exon27
gtacttgattataacaatgc

SEQ ID NO: 171 - DNA, 20 bp, Artificial Sequence
  32-20 ASO for WRN Exon27
ggtacttgattataacaatg

SEQ ID NO: 172 - DNA, 20 bp, Artificial Sequence
  33-20 ASO for WRN Exon27
tggtacttgattataacaat

SEQ ID NO: 173 - DNA, 20 bp, Artificial Sequence
  34-20 ASO for WRN Exon27
ctggtacttgattataacaa

SEQ ID NO: 174 - DNA, 20 bp, Artificial Sequence
  35-20 ASO for WRN Exon27
actggtacttgattataaca

SEQ ID NO: 175 - DNA, 20 bp, Artificial Sequence
  36-20 ASO for WRN Exon27
aactggtacttgattataac

SEQ ID NO: 176 - DNA, 20 bp, Artificial Sequence
  37-20 ASO for WRN Exon27
caactggtacttgattataa

SEQ ID NO: 177 - DNA, 20 bp, Artificial Sequence
  38-20 ASO for WRN Exon27
tcaactggtacttgattata

SEQ ID NO: 178 - DNA, 20 bp, Artificial Sequence
  39-20 ASO for WRN Exon27
ttcaactggtacttgattat

SEQ ID NO: 179 - DNA, 20 bp, Artificial Sequence
  40-20 ASO for WRN Exon27
attcaactggtacttgatta

SEQ ID NO: 180 - DNA, 20 bp, Artificial Sequence
  41-20 ASO for WRN Exon27
aattcaactggtacttgatt

SEQ ID NO: 181 - DNA, 20 bp, Artificial Sequence
  46-20 ASO for WRN Exon27
tacttaattcaactggtact

SEQ ID NO: 182 - DNA, 20 bp, Artificial Sequence
  51-20 ASO for WRN Exon27
ctctgtacttaattcaactg

SEQ ID NO: 183 - DNA, 20 bp, Artificial Sequence
  56-20 ASO for WRN Exon27
ttcttctctgtacttaattc

SEQ ID NO: 184 - DNA, 20 bp, Artificial Sequence
  62-20 ASO for WRN Exon27
caaaccttcttctctgtact

SEQ ID NO: 185 - DNA, 20 bp, Artificial Sequence
  63-20 ASO for WRN Exon27
acaaaccttcttctctgtac

SEQ ID NO: 186 - DNA, 20 bp, Artificial Sequence
  66-20 ASO for WRN Exon27
aaaacaaaccttcttctctg

SEQ ID NO: 187 - DNA, 20 bp, Artificial Sequence
  70-20 ASO for WRN Exon27
ctttaaaacaaaccttcttc

SEQ ID NO: 188 - DNA, 15 bp, Artificial Sequence
  1-15 ASO for WRN Exon27
gatacagttttcgaa

SEQ ID NO: 189 - DNA, 15 bp, Artificial Sequence
  2-15 ASO for WRN Exon27
agatacagttttcga

SEQ ID NO: 190 - DNA, 15 bp, Artificial Sequence
  3-15 ASO for WRN Exon27
aagatacagttttcg

SEQ ID NO: 191 - DNA, 15 bp, Artificial Sequence
  4-15 ASO for WRN Exon27
gaagatacagttttc

SEQ ID NO: 192 - DNA, 15 bp, Artificial Sequence
  5-15 ASO for WRN Exon27
cgaagatacagtttt

SEQ ID NO: 193 - DNA, 15 bp, Artificial Sequence
  6-15 ASO for WRN Exon27
ccgaagatacagttt

SEQ ID NO: 194 - DNA, 15 bp, Artificial Sequence
  7-15 ASO for WRN Exon27
cccgaagatacagtt

SEQ ID NO: 195 - DNA, 15 bp, Artificial Sequence
  8-15 ASO for WRN Exon27
gcccgaagatacagt

SEQ ID NO: 196 - DNA, 15 bp, Artificial Sequence
  9-15 ASO for WRN Exon27
tgcccgaagatacag

SEQ ID NO: 197 - DNA, 15 bp, Artificial Sequence
  10-15 ASO for WRN Exon27
gtgcccgaagataca

SEQ ID NO: 198 - DNA, 15 bp, Artificial Sequence
  11-15 ASO for WRN Exon27
ggtgcccgaagatac

SEQ ID NO: 199 - DNA, 15 bp, Artificial Sequence
  12-15 ASO for WRN Exon27
tggtgcccgaagata

SEQ ID NO: 200 - DNA, 15 bp, Artificial Sequence
  13-15 ASO for WRN Exon27
ttggtgcccgaagat

SEQ ID NO: 201 - DNA, 15 bp, Artificial Sequence
  14-15 ASO for WRN Exon27
tttggtgcccgaaga

SEQ ID NO: 202 - DNA, 15 bp, Artificial Sequence
  15-15 ASO for WRN Exon27
ctttggtgcccgaag

SEQ ID NO: 203 - DNA, 15 bp, Artificial Sequence
  16-15 ASO for WRN Exon27
tctttggtgcccgaa

SEQ ID NO: 204 - DNA, 15 bp, Artificial Sequence
  17-15 ASO for WRN Exon27
ctctttggtgcccga

SEQ ID NO: 205 - DNA, 15 bp, Artificial Sequence
  18-15 ASO for WRN Exon27
gctctttggtgcccg

SEQ ID NO: 206 - DNA, 15 bp, Artificial Sequence
  19-15 ASO for WRN Exon27
tgctctttggtgccc

SEQ ID NO: 207 - DNA, 15 bp, Artificial Sequence
  20-15 ASO for WRN Exon27
atgctctttggtgcc

SEQ ID NO: 208 - DNA, 15 bp, Artificial Sequence
  21-15 ASO for WRN Exon27
aatgctctttggtgc

SEQ ID NO: 209 - DNA, 25 bp, Artificial Sequence
  1-25 ASO for WRN Exon27
ggtgcccgaagatacagttttcgaa

SEQ ID NO: 210 - DNA, 25 bp, Artificial Sequence
  3-25 ASO for WRN Exon27
ttggtgcccgaagatacagttttcg

SEQ ID NO: 211 - DNA, 25 bp, Artificial Sequence
  5-25 ASO for WRN Exon27
ctttggtgcccgaagatacagtttt

SEQ ID NO: 212 - DNA, 25 bp, Artificial Sequence
  7-25 ASO for WRN Exon27
ctctttggtgcccgaagatacagtt

SEQ ID NO: 213 - DNA, 25 bp, Artificial Sequence
  9-25 ASO for WRN Exon27
tgctctttggtgcccgaagatacag

SEQ ID NO: 214 - DNA, 25 bp, Artificial Sequence
  11-25 ASO for WRN Exon27
aatgctctttggtgcccgaagatac

SEQ ID NO: 215 - DNA, 25 bp, Artificial Sequence
  15-25 ASO for WRN Exon27
taacaatgctctttggtgcccgaag

SEQ ID NO: 216 - DNA, 24 bp, Artificial Sequence
  15-24 ASO for WRN Exon27
aacaatgctctttggtgcccgaag

SEQ ID NO: 217 - DNA, 23 bp, Artificial Sequence
  15-23 ASO for WRN Exon27
acaatgctctttggtgcccgaag

SEQ ID NO: 218 - DNA, 22 bp, Artificial Sequence
  15-22 ASO for WRN Exon27
caatgctctttggtgcccgaag

SEQ ID NO: 219 - DNA, 21 bp, Artificial Sequence
  15-21 ASO for WRN Exon27
aatgctctttggtgcccgaag

SEQ ID NO: 220 - DNA, 19 bp, Artificial Sequence
  15-19 ASO for WRN Exon27
tgctctttggtgcccgaag

SEQ ID NO: 221 - DNA, 18 bp, Artificial Sequence
  15-18 ASO for WRN Exon27
gctctttggtgcccgaag

SEQ ID NO: 222 - DNA, 17 bp, Artificial Sequence
  15-17 ASO for WRN Exon27
ctctttggtgcccgaag

SEQ ID NO: 223 - DNA, 16 bp, Artificial Sequence
  15-16 ASO for WRN Exon27
tctttggtgcccgaag

SEQ ID NO: 224 - DNA, 19 bp, Artificial Sequence
  16-19 ASO for WRN Exon27
atgctctttggtgcccgaa

SEQ ID NO: 225 - DNA, 18 bp, Artificial Sequence
  16-18 ASO for WRN Exon27
tgctctttggtgcccgaa

SEQ ID NO: 226 - DNA, 17 bp, Artificial Sequence
  16-17 ASO for WRN Exon27
gctctttggtgcccgaa

SEQ ID NO: 227 - DNA, 16 bp, Artificial Sequence
  16-16 ASO for WRN Exon27
ctctttggtgcccgaa

SEQ ID NO: 228 - DNA, 19 bp, Artificial Sequence
  10-19 ASO for WRN Exon27
tttggtgcccgaagataca

SEQ ID NO: 229 - DNA, 18 bp, Artificial Sequence
  10-18 ASO for WRN Exon27
ttggtgcccgaagataca

SEQ ID NO: 230 - DNA, 17 bp, Artificial Sequence
  10-17 ASO for WRN Exon27
tggtgcccgaagataca

SEQ ID NO: 231 - DNA, 16 bp, Artificial Sequence
  10-16 ASO for WRN Exon27
ggtgcccgaagataca

SEQ ID NO: 232 - DNA, 19 bp, Artificial Sequence
  12-19 ASO for WRN Exon27
tctttggtgcccgaagata

SEQ ID NO: 233 - DNA, 18 bp, Artificial Sequence
  12-18 ASO for WRN Exon27
ctttggtgcccgaagata

SEQ ID NO: 234 - DNA, 27 bp, Artificial Sequence
  WRN_Exon26_Fw
ctcagagcctcatccttcaagctaatg

SEQ ID NO: 235 - DNA, 25 bp, Artificial Sequence
  WRN_Exon29_Rv
caatctgagtctcctgctcttgtgc

SEQ ID NO: 236 - DNA, 25 bp, Artificial Sequence
  WRN_Exon25_Fw
ctggcaaggatcaaacagagagttg
